(19) United States
(12) Patent Application Publication
(10) Pub. No.: US 2016/0168541 A1
(43) Pub. Date: Jun. 16, 2016

(54) TRANSDUCIBLE MATERIALS FOR CELL REPROGRAMMING

(71) Applicant: VIVOSCRIPT, INC., Costa Mesa, CA (US)

(72) Inventors: Yong ZHU, Anaheim, CA (US); Huei-Sheng Vincent CHEN, La Jolla, CA (US); Shili WU, Edmond, OK (US); Jun BAO, Rowland Heights, CA (US)

(21) Appl. No.: 14/908,534

(22) PCT Filed: Jul. 29, 2014
(86) PCT No.: PCT/US14/48646

§ 371 Date: Jan. 28, 2016

Related U.S. Application Data
(60) Provisional application No. 61/958,493, filed on Jul. 29, 2013.

(51) Int. Cl. C12N 5/0775; C07K 14/47; C07K 14/435

(52) U.S. Cl. CPC C12N 5/0662; C07K 14/43595; C07K 14/47; C07K 2319/095; C07K 2319/09; C07K 2319/60; C12N 2506/13; C12N 2501/60; C12N 2501/999

(57) ABSTRACT

The present inventions are directed to compositions and methods regarding the reprogramming of biological samples (such as cells) without introducing exogenous genes to the sample. In particular, the present inventions are directed to transducible materials that are capable of transducing into the nuclei and have enhanced retention in the nuclei of the biological sample. The present inventions also are directed to methods of reprogramming a biological sample or treating diseases using the transducible compositions thereof.

### CROSS-REFERENCE TO RELATED APPLICATIONS

[0001] This application claims priority to U.S. provisional patent application No. 61/958,493, filed Jul. 29, 2013, the disclosure of which is incorporated herein by reference in their entirety.

### FIELD OF THE INVENTION

[0002] The present invention generally relates to tranducible materials for cell re-programming.

### BACKGROUND OF THE INVENTION

[0003] Cell fate reprogramming refers to a process in which a somatic cell de-differentiates into an induced pluripotent stem cell (iPSC) or trans-differentiates into a different type of somatic cell (the target cell). Cell fate reprogramming is of great clinical interest because the iPSCs or the target cells are derived from one's own somatic cells and can be used for tissue therapy without immunological rejection. A number of genetic approaches have been developed for cell fate reprogramming via viral transduction (see e.g., Takahashi and Yamanaka, Induction of pluripotent stem cells form mouse embryonic and adult fibroblast cultures by defined factors, Cell, 126(4), 663-676 (2006), and Stadtfeld et al., Induced pluripotent stem cells generated without viral integration, Science, 322, 945-949 (2008)), transient transfection (Okita et al., Generation of germline-competent induced pluripotent stem cells, Nature, 448 313-317 (2007)) or a transposition system (Woltjen et al., PiggyBac transposition reprograms fibroblasts to induced pluripotent stem cells, Nature, 458, 766-770 (2009)). However, the use of viral and other modified method all involve the use of genetic materials with drawbacks of genome modification by exogeneous sequences in target cells and having inadequate control of expression level of transgenes.

[0004] Cell fate reprogramming via reprogramming proteins possesses excellent safety and convenience for it does not involve any change of cellular genome. During the whole protein reprogramming processes, the main difficulty is how to transduce protein into nuclei and initiate reprogramming procedures. First, the protein must be transported across cytomembrane. A number of approaches have been developed to facilitate transportation across cell membrane, including fusing the protein with a supercharged protein or a cell penetrating peptide (see Zhou et al., Generation of induced pluripotent stem cells using recombinant proteins, Cell Stem Cell, 4, 381-384 (2009); Kim et al., Generation of human induced pluripotent stem cells by direct delivery of reprogramming proteins, Cell Stem Cell, 4 472-476 (2009)). However, once transported into the cells, most of such fusion proteins are trapped in the endosomes and cannot escape into the cytosol and further shuttled into the nuclei, resulting in low reprogramming efficiency. Therefore, there are needs in the field to develop new materials and methods to transduce reprogramming proteins into nuclear and increase the reprogramming efficiency.

### BRIEF SUMMARY OF THE INVENTION

[0005] In one aspect, the present disclosure relates to a tranducible material comprising an isolated polypeptide capable of transducing and retaining in a cell nucleus, wherein the isolated polypeptide comprises an effector domain. In certain embodiments, the effector domain comprises an amino acid sequence mutated from a nuclear export signal. In certain embodiments, the NES comprises an amino acid sequence of Y¹-X₍₂₋₃₎-Y²-X-Y³, wherein Y¹, Y² and Y³ are independently selected from the group consisting of leucine, isoleucine, valinine, phenylalanine and methionine, and X=spacing amino acid. In certain embodiments, the NES comprises an amino acid residue sequence of LX₍₁₋₃₎LX₍₂₋₃₎LXL, wherein L=leucine and X=spacing amino acid. In certain embodiments, the NES is mutated by replacing at least one of Y¹, Y² and Y³ in the NES with an alanine.

[0006] In certain embodiments, the effector domain is capable of exerting reprogramming changes of a biological sample once transduced into a biological sample. In certain embodiments, the effector domain is inherently capable of transducing into the biological sample.

[0007] In certain embodiments, the transducible material further comprises a nuclear localization signal, which is covalently or non-covalently associated with or linked to the effector domain. In certain embodiments, the NLS is exogenous to the effector domain. In certain embodiments, the NLS is covalently linked to the effector domain through a linker.

[0008] In certain embodiments, the transducible material further comprises a transduction domain, which is covalently or non-covalently associated with or linked to the effector domain. In certain embodiments, the tranduction domain is covalently linked to the effector domain through a linker.

[0009] In certain embodiments, the transducible material is capable of selectively transducing into one or more specific biological samples or becoming transducible in a specific environment surrounding the biological sample.

[0010] Another aspect of the present disclosure relates to a composition comprising a biological sample and a transducible material, wherein the transducible material has transduced into the biological sample.

[0011] Another aspect of the present disclosure relates to a method of reprogramming a biological sample by exposing the biological sample to a composition comprising a transducible material.

[0012] Another aspect of the present disclosure relates to a method of treating a disease or condition in a biological organism comprising administering a pharmaceutical composition comprising a transducible material into the biological organism.

[0013] Another aspect of the present disclosure relates to a method of treating a disease or condition in a biological organism comprising transplanting a biological sample into the biological organism, wherein the biological sample is transduced with a transducible material.

[0014] Another aspect of the present disclosure relates to a method for reprogramming a biological sample, comprising: exposing the biological sample to a tranducible material comprising an effector domain; and blocking the nuclear export of the transducible material.

[0015] Another aspect of the present disclosure relates to a method for identifying a transducible material comprising an isolated polypeptide capable of transducing and retaining in a cell nucleus, wherein the isolated polypeptide comprises an effector domain, the method comprising: modifying the isolated polypeptide; introducing the modified isolated polypeptide into a biological sample; and observing the localization of the modified isolated polypeptide in the biological sample.

### BRIEF DESCRIPTION OF THE FIGURES

[0016] FIG. 1. Schematic of a polypeptide comprising an effector domain with a mutated NES. A super charged GFP and a transduction domain of 11R are fused at the N-terminus and C-terminus of the effector domain respectively.

[0017] FIG. 2. Comparison of sGFP-Oct4(mNES) and sGFP-Oct4 protein in regulating the expression of downstream genes. HepG2 cells were treated with sGFP, sGFP-Oct4 or sGFP-Oct4(mNES) in serum-free medium for 6 hours. RNA was isolated and RT-qPCR was performed. The expression of each gene was normalized by the expression level of GAPDH. The relative expression level of each gene in the control condition (sGFP-treated sample) was set as 1.00.

[0018] FIG. 3. Schematic of the three generations of transducible materials derived from MyoD. (A) The first generation takes the form of sGFP-MyoD-11R. (B) The second generation has a classical NLS (SV40 T antigen NLS) inserted between sGFP and MyoD. (C) The third generation is the 2nd generation with the NES disrupted by site-directed mutagenesis.

[0019] FIG. 4. Schematic of experimental protocol to convert fibroblasts to myoblasts with transducible materials derived from MyoD.

[0020] FIG. 5. Live fluorescent imaging of human fibroblasts after culturing in 10 μg/ml of first generation sGFP-MyoD-11R. At 10 μg/ml, sGFP-MyoD-11R polypeptides entered the cells but were confined in the cytoplasmic compartment with minimal nuclear occupancy.

[0021] FIG. 6. The second generation of transducible materials derived from MyoD showed better nuclear stay than the first generation, but its nuclear occupancy is not sustainable. (A) Adult human fibroblasts were cultured with 10 μg/ml sGFP-NLS-MyoD-11R polypeptides, and GFP signal were observed in the nuclei. (B) The GFP signal in the nuclei decreased after 24 hours, indicating that most of the sGFP-NLS-MyoD-11R polypeptides were exported. (C) Adding leptomycin B (5 nM) slightly improves the nuclear occupancy of sGFP-NLS-MyoD-11R.

[0022] FIG. 7. The third generation of transducible material derived from MyoD significantly increased nuclear occupancy. Adult human fibroblasts were cultured with 10 μg/ml sGFP-NLS-MyoD(mNES)-11R polypeptides with 5 nM leptomycin B. Strong GFP signal was observed in nuclei at 30 min (FIG. 7A), 24 hours (FIG. 7B) and 48 hours (FIG. 7C) after culturing.

[0023] FIG. 8. Fibroblasts were induced to differentiate into satellite cells (SCs) and myoblasts by the third generation of transducible materials derived from MyoD. (A) At 18-22 D after exposure to sGFP-NLS-MyoD(mNES)-11R polypeptides and leptomycin B, human fibroblasts were converted to Pax7+/Myf5+ SCs. (B) After induction by myogenic media, SCs differentiated into endogenous MyoD+ myoblasts with positive demsin staining. No GFP signal from sGFP-NLS-MyoD(mNES)-11R polypeptide could be detected after 22 days after the polypeptide application.

### DETAILED DESCRIPTION OF THE INVENTION

[0024] The present disclosure relates to a transducible material capable of being transduced into the nuclei of a biological sample. In particular, the transducible material has increased retention in the nuclei, and as such, is capable of reprogramming the biological sample in a higher efficiency.

[0025] The present disclosure is based on the discovery that in order to achieve a high efficiency of reprogramming, a transducible material must overcome three hurdles. First, the transducible material must be transported across cytomembrane. As the functional component of a transducible material that exerts reprogramming function is often protein-based, which by itself usually cannot across cytomembrane, the transducible material must be engineered to facilitate the functional component to be uptake by the biological sample; second, as most functional components are derived from transcription factors or other nuclear proteins, which must enter the nuclei to become functional, the functional component, after being uptake by the biological sample, must be translocated into the nuclei. The inventors of the present disclosure found that once transported into the cells, most of the transducible materials tend to be trapped in the endosomes and cannot escape into the cytosol and further shuttled into the nuclei, resulting in low reprogramming efficiency. Third, the inventors of the present disclosure found that after nuclear translocation, the transducible materials tend to be pumped back to cytoplasm via the nuclear exporting system in a very short period of time, resulting in low reprogramming efficiency. In certain embodiments, the inventors surprisingly found that retention of a transducible material in the nuclei of a biological sample for longer time is critical for reprogramming the biological sample, and enhanced nuclear retention of a transducible material significantly increased the reprogramming efficiency.

[0026] One aspect of the present disclosure relates to a tranducible material comprising an isolated polypeptide capable of being retained in a cell nucleus, wherein the isolated polypeptide comprises an effector domain.

[0027] In certain embodiments, a transducible material used herein refers to a molecule or a composition capable of crossing a membrane of a biological sample (e.g., a cell membrane) so that the transducible material can enter or be brought into the inside of the biological sample from the outside of the biological sample and exerts reprogramming effects. For example, the transducible material may interact with cell-surface receptors which facilitate the entry of the material into cells through receptor mediated endocytosis.

[0028] In certain embodiments, a transducible material is selectively tranducible, i.e., the transducible material is more likely to transduce into a specific type of biological samples (e.g., cancer or tumor cells) or becomes transducible in a specific microenvironment in or around a biological sample (e.g., microenvironment around cancer or tumor) than other biological samples. For example, the selective transducible material comprises a transducible domain (e.g., a cell-targeting peptide or an activatable cell penetrating peptide) that preferably delivers the selective transducible material into a specific type of biological sample or become transducible in a microenvironment around a biological sample.

[0029] Without being bounded to any theories, it is contemplated that the transducible materials may cross a cell membrane and enter into cytoplasm to reprogram cytoplasm activities such as translation, post translation modification, signaling pathway, apoptosis pathway. It is further contemplated that the transducible material may cross the nucleus membrane and reprogram or modulate DNA or chromosomal replication, gene transcription or RNA splicing.

[0030] The term “polypeptide” as used herein refers to a compound made up of a single chain of amino acid residues linked by peptide bonds. The term “protein” as used herein is used interchangeably with the term “polypeptide”.

[0031] The term “isolated” as used herein refer to a polypeptide that is removed from at least one component with which it is naturally associated.

[0032] The term “retain” or “retention” in nuclei as used herein refers to the nuclear occupancy of the isolated polypeptide. In certain embodiments, retention in nuclei means that the isolated polypeptide stays in nuclei for more than 24 hours. In certain embodiments, retention in nuclei means that the isolated polypeptide stays in nuclei for more than 48 hours. In certain embodiments, retention in nuclei means that the isolated polypeptide stays in nuclei for more than 72 hours.

[0033] In certain embodiments, the isolated polypeptide comprises an effector domain, wherein the effector domain comprises an amino acid sequence mutated from a nuclear export signal (NES).

[0034] An effector domain as used herein is a polypeptide or a fragment thereof that, once inside a biological sample, is capable of exerting reprogramming changes of the biological sample. The effector domain may interact with molecules (e.g., proteins, DNA, RNA, sugars, and lipids) in the biological sample (e.g., in cytoplasm or nuclei) and lead to changes such as proliferation, differentiation, de-differentiation, transdifferentiation, retro-differentiation, transdetermination, apoptosis, and morphogenesis.

[0035] In certain embodiments, an effector domain is a nuclear protein such as a transcription factor, a chromosome remodeling protein and enzymes involved in DNA replication, transcription and repair, or a fragment or mimic thereof.

[0036] In certain embodiments, the effector domain comprises an amino acid sequence mutated from a nuclear export signal (NES). A NES is a short amino acid sequence in a protein that targets it for export from the cell nucleus to the cytoplasm. This export is mostly mediated by the karyopherin exportin 1/chromosomal region maintenance 1 (CRM1) recognizing the NES of the cargo molecules. The classical NES is characterized by three to four conserved hydrophobic residues, usually leucine, and the spacing between them. A common classical NES has the consensus sequences of LX₍₁₋₃₎LX₍₂₋₃₎LXL, where L=Leu, X=spacing amino acid (i.e., any amino acid residue found in a polypeptide including alanine, arginine, asparagine, aspartic acid, cysteine, glutamic acid, glutamine, glycine, histidine, isoleucine, leucine, lysine, methionine, phenyalanine, proline, serine, threonine, tryptophan, tyrosine and valine). More recently, a consensus sequence of NES of Y¹-X₍₂₋₃₎-Y²-X-Y³, wherein Y¹, Y² and Y³ are independently selected from the group consisting of leucine, isoleucine, valinine, phenylalanine and methionine, and X=spacing amino acid, has been proposed (Fu et al., Prediction of leucine-rich nuclear export signal containing proteins with NESsential, Nucleic Acids Res., 39:e111 (2011)). Some examples of NES are listed in Table 1. In addition, several database has been established with collection of NES-containing proteins or for NES prediction, including NESbase, NetNES and ValidNESs.

TABLE 1
Examples of NES.

| Y¹-XX-Y²-X-Y³ | Y¹-XXX-Y²-X-Y³ |
|---|---|
| LXXXLXXLXL | LXXXLXXXLXL |
| LXXLXXXLXL | LXXLXXLXL |
| LXLXXLXL | LXLXXXLXL |

Y¹, Y² and Y³ are independently selected from the group consisting of leucine, isoleucine, valinine, phenylalanine and methionine, L = leucine and X = spacing amino acid

[0037] The term “mutate” or “mutated” as used herein refers to a change of the amino acid sequence of a NES such that the function of the NES to export the protein out of cell nuclei is disrupted. As a result, the retention of the effector domain within nuclei will be enhanced. In certain embodiments, enhanced retention in the nucleus increases the half-life of the transducible material in a biological sample. In certain embodiments, enhanced retention of a protein in the nucleus shift the distribution of the protein in the cell so that the protein escapes from the endosome and further enters the cell nuclei.

[0038] In certain embodiments, a NES is mutated by replacing the hydrophobic residues in the NES sequence (e.g., leucine, isoleucine, valinine, phenylalanine or methionine) with alanine. In certain embodiments, a NES is mutated by replacing at least one hydrophobic residue with alanine. In certain embodiments, a NES is disrupted by replacing at least two hydrophobic residues with alanine. In certain embodiments, a NES is disrupted by replacing at least three hydrophobic residues with alanine. In certain embodiments, a NES is disrupted by replacing at least four conserved hydrophobic residues with alanine. In certain examples, the hydrophobic residues being replaced in the NES is leucine. For example, a NES with consensus sequence of LX₍₁₋₃₎LX₍₂₋₃₎LXL can be mutated to AX₍₁₋₃₎LX₍₂₋₃₎LXL, LX₍₁₋₃₎AX₍₂₋₃₎LXL, LX₍₁₋₃₎LX₍₂₋₃₎AXL, LX₍₁₋₃₎LX₍₂₋₃₎LXA, AX₍₁₋₃₎AX₍₂₋₃₎LXL, AX₍₁₋₃₎LX₍₂₋₃₎AXL, AX₍₁₋₃₎LX₍₂₋₃₎LXA, LX₍₁₋₃₎AX₍₂₋₃₎AXL, LX₍₁₋₃₎AX₍₂₋₃₎LXA, LX₍₁₋₃₎LX₍₂₋₃₎AXA, AX₍₁₋₃₎AX₍₂₋₃₎AXL, AX₍₁₋₃₎AX₍₂₋₃₎LXA, AX₍₁₋₃₎LX₍₂₋₃₎AXA or AX₍₁₋₃₎AX₍₂₋₃₎AXA. A NES with consensus sequences of Y¹-X₍₂₋₃₎-Y²-X-Y³ can be mutated to A-X₍₂₋₃₎-Y²-X-Y³, Y¹-X₍₂₋₃₎-A-X-Y³, Y¹-X₍₂₋₃₎-Y²-X-A, A-X₍₂₋₃₎-A-X-Y³, A-X₍₂₋₃₎-Y²-X-A, Y¹-X₍₂₋₃₎-A-X-A or A-X₍₂₋₃₎-A-X-A.

[0039] In certain embodiments, an effector domain is derived from a nuclear protein selected from the group consisting of Ascl1 (SEQ ID NO: 1), Baf60c (SEQ ID NO: 2), Brn2 (SEQ ID NO: 3), Brn4 (SEQ ID NO: 4), Chd5 (SEQ ID NO: 5), c-Myc (SEQ ID NO: 6), Dlx1 (SEQ ID NO: 7), Dlx2 (SEQ ID NO: 8), Foxp1 (SEQ ID NO: 9), Foxp2 (SEQ ID NO: 10), Foxp3 (SEQ ID NO: 11), Gata4 (SEQ ID NO: 12), Hand1 (SEQ ID NO: 13), Hes1 (SEQ ID NO: 14), Hes5 (SEQ ID NO: 15), Isl1 (SEQ ID NO: 16), Lhx2 (SEQ ID NO: 17), Klf4 (SEQ ID NO: 18), MafA (SEQ ID NO: 19), Mef2c (SEQ ID NO: 20), Mesp1 (SEQ ID NO: 21), MyoD (SEQ ID NO: 22), Myt1L (SEQ ID NO: 23), Nanog (SEQ ID NO: 24), Nap1L2 (SEQ ID NO: 25), NeuroD1 (SEQ ID NO: 26), NeuroD2 (SEQ ID NO: 27), Ngn2 (SEQ ID NO: 28), Ngn3 (SEQ ID NO: 29), Nhlh2 (SEQ ID NO: 30), Nkx2.2 (SEQ ID NO: 31), Nkx2.5 (SEQ ID NO: 32), Nkx6.1 (SEQ ID NO: 33), Npas4 (SEQ ID NO: 34), Nrip3 (SEQ ID NO: 35), Oct4 (SEQ ID NO: 36), Oligo2 (SEQ ID NO: 37), Pax6 (SEQ ID NO: 38), Pax7 (SEQ ID NO: 39), Pdx1 (SEQ ID NO: 40), Prdm8 (SEQ ID NO: 41), Satb2 (SEQ ID NO: 42), Shox2 (SEQ ID NO: 43), Sox2 (SEQ ID NO: 44), Sox9 (SEQ ID NO: 45), Tbr1 (SEQ ID NO: 46), Tbx5 (SEQ ID NO: 47), Tbx18 (SEQ ID NO: 48), Zic1 (SEQ ID NO: 49).

[0040] In certain embodiments, the term “derive” or “derived” as used herein refers to a polypeptide comprising an amino acid sequence substantially identical to the sequence of a protein (e.g., a nuclear protein) or a fragment thereof that contains an innate NES, except that the amino acid sequence of the polypeptide that corresponding to the NES is mutated so that the function of the NES is disrupted.

[0041] In certain embodiments, an effector domain comprises an amino acid sequence selected from the group consisting of SEQ ID NO: 50-98.

[0042] In certain embodiments, the transducible material further comprises an agent that inhibits nuclear export. In certain embodiments, the agent is leptomycin B.

[0043] In certain embodiments, the transducible material further comprises a nuclear localization signal (NLS). The NLS is associated with the effector domain covalently, noncovalently or via a linker. In certain embodiments, the NLS is covalently linked to the effector domain through a linker. In certain embodiments, the linker is a glycine-rich linker that comprises one or more glycine residues (e.g. ESGGGGSPG (SEQ ID NO: 99), GGSGGSGGSGGSH (SEQ ID NO: 100)).

[0044] NLS are short peptide motifs that mediate the nuclear import of proteins by binding to their receptors, known as importins (karyopherins). Typically, an NLS consists of one or more short sequences of positively charged lysine's or arginines exposed on the protein surface. An NLS has the opposite function of a NES, which targets proteins out of the nucleus. NLSs mediated by the importins pathway has been well characterized (see Kosugi et al., Six classes of nuclear localization signals specific to different binding grooves of importin α, Journal of Biol. Chemistry, 284, 478-485 (2008)). In general, NLSs can be grouped into classical NLSs, whose consensus sequence has been defined, and non-classical NLSs. Classical NLSs can be further classified as either monopartite or bipartite. Monopartite NLSs have a single cluster of three or more consecutive basic amino acid residues. Examples of monopartite NLSs include the SV40 large T antigen NLS (PKKKRKV (SEQ ID NO: 101)) and the c-Myc NLS (PAAKRVKLD (SEQ ID NO: 102)). Bipartite NLSs have two clusters of basic amino acids separated by a 10-12-amino acid linker, and have a consensus sequence of (K/R)(K/R)X₁₀₋₁₂(K/R)_{3/5}, where (K/R)_{3/5} represents at least three of either lysine or arginine of five consecutive amino acids. An example of bipartite NLS is the nucleoplasmin NLS (KRPAATKKAGQAKKKK (SEQ ID NO: 103)). Examples of non-classical NLSs include acidic M9 domain of hnRNP A1, the sequence KIPIK in yeast transcription repressor Matα2, and the complex signals of U snRNPs.

[0045] In certain embodiments, an effector domain contains an innate NLS. In certain embodiments, the NLS is exogenous to the effector domain, which means the NLS associated with the effector domain is not an innate NLS of the effector domain.

[0046] In certain embodiments, associating a NLS with an effector domain is capable of facilitating the entry of the transducible material into the nucleus of a biological sample. In certain embodiments, associating a NLS with an effector domain is capable of shifting the distribution equilibrium of the transducible material among different intracellular compartments towards nuclear localization. In certain embodiments, associating a NLS with an effector domain is capable of facilitating the transducible material escaping from the endosome of a biological sample.

[0047] In certain embodiments, a transducible material further comprises a transduction domain. A transduction domain is a motif that is capable of facilitating the entry of the transducible material into a biological sample (e.g., a cell). The transducible domain is associated with the effector domain covalently, noncovalently or via a linker. In certain embodiments, the transduction domain is covalently linked to the effector domain through a linker. In certain embodiments, the linker is a glycine-rich linker that comprises one or more glycine residues.

[0048] Examples of a transduction domain include, without limitation, polymers such as cationic lipid polymers and nanoparticles, protein transduction domains (PTD), cell penetrating peptides (CPP1), cell permeating peptides (CPP2), activatable cell penetrating peptides or conjugates (ACPP), and cell-targeting peptides (CTP).

[0049] Examples of a transduction domain has been disclosed in PCT Application PCT/US2009/069518, published as WO2010075575, which is incorporated herein by reference in their entirety.

[0050] In certain embodiments, a transducible domain is a protein transduction domain selected from the group consisting of super charged protein, TAT, poly-arginine, Penetratin, Antennapedia, VP22, Transportan, MAP, MTS, PEP-1, Arg/Trp analogue, RRWRRWWRRWWRRW, polyguanidine peptoid, polyguanidine peptoid, inherent protein transduction domain, SEQ ID NO: 104, HIV-1 Rev, Flock house virus coat peptide, DNA-binding peptides, c-Fos, c-Jun, yeast GCN4, and Fusogenic HA2 peptide. In one example, a transducible domain is a supercharged green fluorescent protein (sGFP) (SEQ ID NO: 105).

[0051] In certain embodiments, a transducible material comprises an effector domain that is inherently transducible, and a transduction domain associated with the effector domain via covalent or non-covalent interactions.

[0052] In certain embodiments, a transducible material further comprises one or more motifs that do not interrupt the function of the effector domain or the transduction domain. In certain embodiments, these motifs are linked covalently, non-covalently or through a linker to the effector domain and/or the transduction domain. In certain embodiments, these motifs facilitate the preparation and/or purification of the transducible material. One example of such motif is a polyhistidine-tag to facilitate protein purification in preparation of the transducible material. In certain embodiments, the polyhistidine-tag comprises at least six histidine residues (e.g. MGSSHHHHHHSSGLVPRGSH (“His6,” SEQ ID NO: 106)).

[0053] In certain embodiments, a tranducible material comprises an isolated polypeptide that has the form of TD-linker-NLS-linker-ED(mNES), where TD=transduction domain, ED(mNES)=effector domain with a disrupted NES. In certain embodiments, a transduction material comprises an isolated polypeptide that has the form of TD-linker-ED(mNES)-linker-NLS. In certain embodiments, a transduction material comprises an isolated polypeptide that has the form of NLS-linker-TD-linker-ED(mNES). In certain embodiments, a transduction material comprises an isolated polypeptide that has the form of TD-linker-NLS-linker-ED(mNES).). In certain embodiments, a transduction material comprises an isolated polypeptide that has the form of TD1-linker-NLS-linker-ED(mNES)-linker-TD2. In certain embodiments, a tranducible material comprising an isolated polypeptide that has the form of sGFP-linker-ED(mNES)-11R. In certain embodiments, a tranducible material comprising an isolated polypeptide that has the form of sGFP-linker-NLS-linker-ED(mNES)-11R. In certain embodiments, a transducible material comprises an isolated polypeptide that comprises an amino acid sequence selected from the group consisting of SEQ ID NO: 107-155.

[0054] Another aspect of the present disclosure relates to a composition comprising a biological sample and at least one transducible material, wherein the transducible material has transduced into the biological sample. For example, the composition includes a transducible material comprising an isolated polypeptide derived from Foxp3 (e.g. sGFP-Foxp3(mNES)-11R) and a T cell wherein the transducible material has transduced into the T cell. For another example, a composition includes a iPS cell and one or more transducible materials comprising an isolated polypeptide derived from a protein selected from the group consisting of Oct4, Klf4, Sox2 and c-Myc, and any combination thereof (e.g. sGFP-Oct4(mNES)-11R, sGFP-Klf4(mNES)-11R, sGFP-Sox2(mNES)-11R, sGFP-c-Myc(mNES)-11R). In yet another example, a composition including a liver or pancreatic exocrine cell and one or more transducible materials comprising a polypeptide derived from a protein selected from the group consisting of Ngn3, Pdx1, MafA, NeuroD1, and any combination thereof (e.g. sGFP-Ngn3(mNES)-11R, sGFP-Pdx1(mNES)-11R, sGFP-MafA(mNES)-11R, sGFP-NeuroD1(mNES)-11R) wherein the transducible materials have transduced into the liver or pancreatic exocrine cell. In yet another example, a composition including a fibroblast cell and a transducible material comprising a polypeptide derived from MyoD (e.g., sGFP-MyoD(mNES)-11R, sGFP-NLS-MyoD(mNES)-11R), wherein the transducible material has transduced into the fibroblast cell.

[0055] Another aspect of the present disclosure relates to a method of reprogramming a biological sample by exposing the biological sample to a composition comprising a transducible material. In certain embodiments, the method preferably reprograms a specific type of biological sample (e.g. cancer or tumor cells) or biological samples in or around a specific microenvironment within a biological organism (e.g. microenvironment around cancer or tumor) than other biological samples by exposing biological samples to a composition comprising a selective transducible material.

[0056] In one embodiment, a biological sample includes a cell, a cluster of cells, a tissue, an organ, a biological body from a biological organism. The biological sample can be normal, healthy sample or abnormal, diseased sample (e.g., cancer or tumor).

[0057] A biological organism includes, for example, a microorganism (e.g., bacteria), a fungus, a plant and an animal (e.g., a human).

[0058] An organ from an animal biological organism (e.g., human) includes, for example, a circulatory organ (e.g., heart, blood and blood vessels), a digestive organ (e.g., salivary glands, esophagus, stomach, liver, gallbladder, pancreas, intestines, rectum and anus), an endocrine organ (e.g., endocrine glands such as the hypothalamus, pituitary or pituitary gland, pineal body or pineal gland, thyroid, parathyroids and adrenals, i.e., adrenal glands), an integumentary organ (e.g., skin, hair and nails), a lymphatic organ (e.g., lymph nodes and vessels, tonsils, adenoids, thymus and spleen), a muscular organ (e.g., muscles), a nervous organ (e.g., brain, spinal cord, peripheral nerves and nerves), a reproductive organ (e.g., ovaries, fallopian tubes, uterus, vagina, mammary glands, testes, vas deferens, seminal vesicles, prostate and penis), a respiratory organ (e.g., the pharynx, larynx, trachea, bronchi, lungs and diaphragm), a skeletal organ (e.g., bones, cartilage, ligaments and tendons), a urinary system (e.g., kidneys, ureters, bladder and urethra). An organ can be normal or healthy, and alternatively, abnormal or unhealthy (e.g., cancerous).

[0059] An organ from a plant biological organism includes, for example, root, stem, leaf, flower, seed and fruit.

[0060] A tissue from a biological sample (e.g. an animal) includes a connective tissue, a muscle tissue, a nervous tissue, and an epithelial tissue. A tissue can be normal or healthy, and alternatively, abnormal or unhealthy (e.g., cancerous). A tissue from a biological sample (e.g. a plant) includes an epidermis, a vascular tissue and a ground tissue.

[0061] A cell can be prokaryotic or eukaryotic. A prokaryotic cell includes, for example, bacteria. A eukaryotic cell includes, for example, a fungus, a plant cell, and an animal cell. The types of an animal cell (e.g., a mammalian cell or a human cell) includes, for example, a cell from circulatory/immune system or organ (e.g., a B cell, a T cell (cytotoxic T cell, natural killer T cell, regulatory T cell, T helper cell), a natural killer cell, a granulocyte (e.g., basophil granulocyte, an eosinophil granulocyte, a neutrophil granulocyte and a hypersegmented neutrophil), a monocyte or macrophage, a red blood cell (e.g., reticulocyte), a mast cell, a thrombocyte or megakaryocyte, and a dendritic cell); a cell from an endocrine system or organ (e.g., a thyroid cell (e.g., thyroid epithelial cell, parafollicular cell), a parathyroid cell (e.g., parathyroid chief cell, oxyphil cell), an adrenal cell (e.g., chromaffin cell), and a pineal cell (e.g., pinealocyte)); a cell from a nervous system or organ (e.g., a glioblast (e.g., astrocyte and oligodendrocyte), a microglia, a magnocellular neurosecretory cell, a stellate cell, a boettcher cell, and a pituitary cell (e.g., gonadotrope, corticotrope, thyrotrope, somatotrope, and lactotroph)); a cell from a respiratory system or organ (e.g., a pneumocyte (a type I pneumocyte and a type II pneumocyte), a clara cell, a goblet cell, an alveolar macrophage); a cell from circular system or organ (e.g., myocardiocyte and pericyte); a cell from digestive system or organ (e.g., a gastric chief cell, a parietal cell, a goblet cell, a paneth cell, a G cell, a D cell, an ECL cell, an I cell, a K cell, an S cell, an enteroendocrine cell, an enterochromaffin cell, an APUD cell, a liver cell (e.g., a hepatocyte and Kupffer cell)); a cell from integumentary system or organ (e.g., a bone cell (e.g., an osteoblast, an osteocyte, and an osteoclast), a teeth cell (e.g., a cementoblast, and an ameloblast), a cartilage cell (e.g., a chondroblast and a chondrocyte), a skin/hair cell (e.g., a trichocyte, a keratinocyte, and a melanocyte (Nevus cell)), a muscle cell (e.g., myocyte), an adipocyte, a fibroblast, and a tendon cell), a cell from urinary system or organ (e.g., a podocyte, a juxtaglomerular cell, an intraglomerular mesangial cell, an extraglomerular mesangial cell, a kidney proximal tubule brush border cell, and a macula densa cell), and a cell from reproductive system or organ (e.g., a spermatozoon, a Sertoli cell, a leydig cell, an ovum, an oocyte). A cell can be normal, healthy cell; or a diseased or unhealthy cell (e.g., a cancer cell).

[0062] A cell further includes a mammalian stem cell which include an embryonic stem cell, a fetal stem cell, an induced pluripotent stem cell, and an adult stem cell. A stem cell is a cell that is capable of undergoing cycles of cell division while maintaining an undifferentiated state and differentiating into specialized cell types. A stem cell can be an omnipotent stem cell, a pluripotent stem cell, a multipotent stem cell, an oligopotent stem cell and an unipotent stem cell (See, Hans R. Schóler (2007). “The Potential of Stem Cells: An Inventory” in Nikolaus Knoepffler, Dagmar Schipanski, and Stefan Lorenz Sorgner. Humanbiotechnology as Social Challenge. Ashgate Publishing, Ltd. pp. 28), any of which may be induced from a somatic cell. A stem cell may also include a cancer stem cell.

[0063] In another embodiment, “reprogramming a biological sample” used herein is exchangeable with or refers to modulating, altering, or changing the biological activities of the biological sample (e.g., cell) or modulating, altering, or changing the state or status of the biological sample from one to another. For example, by exposing a biological sample (e.g., a cell) to a transducible material, the biological activities of the cell (e.g., cell growth, cell division, cell metabolism, cell cycle, cell signaling, DNA replication, transcription, RNA splicing, protein synthesis, post-translation modification) are modulated or altered so as to lead to cell proliferation, differentiation (e.g., from progenitor cells to terminally differentiated cells), dedifferentiation (e.g., from terminally differentiated cells to pluripotent stem cells), transdifferentiation (e.g., from one type of terminally differentiated cells to another type of terminally differentiated cells), retro differentiation (e.g., from terminally differentiated cells to progenitor cells), transdertermination (e.g., from one type of progenitor cells to a type of terminally differentiated cells that are usually derived from another type of progenitor cells under natural conditions), apoptosis (e.g., cell death of cells or cancer cells), morphogenesis, and changes in the cell fate. For another example, the state of a biological sample can be altered or changed from abnormal or diseased state to normal or healthy state (e.g., from cancer cells to noncancer cells); from one cell type to another cell type (e.g., from undifferentiated stem cells to differentiated stem cells or specialized cells), from differentiated or specialized cells to undifferentiated cells or stem cells (e.g., an omnipotent stem cell, a pluripotent stem cell, a multipotent stem cell, an oligopotent stem cell and an unipotent stem cell) (e.g., from fibroblast cells to induced pluripotent stem cells (iPSCs)), from somatic cells to stem cells or induced stem cells, from one state of stem cells to another state of stem cells (e.g., from ominipotent stem cells to pluripotent stem cells), from one type of differentiated cells to another type of differentiated cells (e.g., T-cells to regulatory T cells, pancreatic exocrine cells to insulin-producing beta cells).

[0064] In another embodiment, a biological sample is exposed to a transducible material and reprogrammed. The biological sample can be exposed in vitro, in vivo or ex vivo. For example, the biological sample is exposed in vitro through contacting the sample with the transducible material in an environment outside of a living biological organism (e.g., in a cell culture system or a test tube). The biological sample is exposed in vivo through contacting the material with a biological organism containing the sample or introducing (e.g., through administration) the material into the organism. The transducible materials can be administered via any known administration route such as for example parenteral {e.g., subcutaneous, intraperitoneal, intravenous, including intravenous infusion, intramuscular, or intradermal injection) or non-parenteral {e.g., oral, intranasal, intraocular, sublingual, rectal, or topical) route. The biological sample is exposed ex vivo when the biological sample (e.g., a cell, a tissue or an organ) is taken outside the biological organism, contacted with the transducible material, and placed back to the same or different biological organisms. Examples of ex vivo exposures comprise removing a biological sample from the biological organism, exposing the biological sample to a transducible material, and transplanting the biological sample transduced with the transducible material back to the biological organism.

[0065] In certain embodiments, OG2-MEF cells are exposed to a composition comprising protein sGFP-Ngn3(mNES)-11R, sGFP-Pdx1(mNES)-11R, sGFP-MafA(mNES)-11R and reprogrammed to induced pluripotent stem cells (iPSCs).

[0066] In certain embodiments liver and/or pancreatic exocrine cells are exposed to a composition comprising one or more proteins selected from the group consisting of sGFP-Ngn3(mNES)-11R, sGFP-Pdx1(mNES)-11R, sGFP-MafA(mNES)-11R and sGFP-NeuroD1(mNES)-11R, and reprogrammed into insulin producing cells (e.g. β cells). In certain embodiments, the composition further comprises one or more adjuvant such as Islet growth factor (e.g. betacellulin). Without bond to the mechanism, it is further contemplated that such reprogramming is through transdetermination and/or transdifferentiation.

[0067] In certain embodiments, adult fibroblast cells are exposed to a composition comprising sGFP-NLS-MyoD(mNES)-11R and reprogrammed into satellite cells.

[0068] Another aspect of the present disclosure relates to a method of treating, preventing or reducing a disease or condition in a biological organism by administering a composition comprising a transducible material into the organism. In certain embodiments, the composition is a pharmaceutical composition comprising a transducible material. In certain embodiments, the composition comprises a selective transducible material. The treatment, prevention or reduction of a disease or condition is associated with the change or reprogramming of a biological sample (e.g., a cell, a tissue or an organ) in the organism.

[0069] In certain embodiments, the disease or condition treatable by the method include, without limitations, tumor, cancer, metabolic diseases or conditions (e.g. type I and type II diabetes and obesity), inflammatory conditions, cardiac diseases, neuro generative diseases (e.g. anemia, amyotrophic lateral sclerosis, spinal cord injury, burns, or arthritis), autoimmune diseases or conditions (e.g. acute disseminated encephalomyelitis (ADEM), Addison's disease, alopecia areata, ankylosing spondylitis, antiphospholipid antibody syndrome (APS), anemia (e.g. autoimmune hemolytic anemia and pernicious anaemia), arthritis, psoriatic arthritis, rheumatoid arthritis, diabetes mellitus type 1, autoimmune hepatitis, autoimmune inner ear disease, bullous pemphigoid, coeliac disease, Chagas disease, chronic obstructive pulmonary disease, Crohns disease, dermatomyositis, endometriosis, Goodpasture's syndrome, Graves' disease, Guillain-Barre syndrome (GBS), Hashimoto's disease, hidradenitis suppurativa, Kawasaki disease, IgA nephropathy, idiopathic thrombocytopenic purpura, interstitial cyctitis, lupus erythematosus, mixed connective tissue disease, morphea, multiple sclerosis (MS), myasthenia gravis, narcolepsy, neuromyotonia, pemphigus vulgaris, psoriasis, polymyositis, primary billiary cirrhosis, schizophrenia, scleroderma, Sjogren's syndrome, stiff person syndrome, temporal arteritis (“Giant cell arteritis”), ulcerative colitis, vasculitis, vitiligo, and Wegener's granulomatosis).

[0070] For example, it is contemplated that a transducible material can be administered to a biological organism having a tumor to activate the apoptosis of the tumor cells or make tumor cells more sensitive to chemotherapy, radiotherapy, or cancer drugs.

[0071] In certain embodiments, a transducible material can be administered to a biological organism to treat metabolic diseases or conditions such as type I diabetes, type II diabetes, or obesity. For example, to treat diabetes, a composition comprising a protein selected from the group consisting of sGFP-Ngn3(mNES)-11R, sGFP-Pdx1(mNES)-11R, sGFP-MafA(mNES)-11R, sGFP-NeuroD(mNES)-11R and any combination thereof can be transduced into liver and/or pancreatic exocrine cells and programs them to insulin producing cells (e.g. β cells). In certain embodiments, one or more adjuvant such as Islet growth factor (e.g. betacellulin) is/are also administered to the biological organism. Without bond to the mechanism, it is further contemplated that such reprogramming is through transdetermination and/or transdifferentiation.

[0072] It is further contemplated that a transducible material can be administered to a biological organism to treat cardiac diseases such as myocardial infarction or ischemia.

[0073] Another aspect of the present disclosure relates to a method of reprogramming iPSCs, embryonic stem cells, or other types of stem or progenitor cells to certain types of somatic cells or progenitor cells, which can be developed as cell-based therapies for various diseases or conditions, including anemia, neurodegenerative diseases, cancer, amyotrophic lateral sclerosis, spinal cord injury, burns, heart diseases, diabetes, and arthritis. The stem cells or progenitor cells may be patient-specific or non-patient-specific, repaired to rid of molecular defects or not, before they are exposed to transducible materials for controlled differentiation or reprogramming. The reprogrammed cells may be enriched, purified, or manipulated before transplanted back to patients.

[0074] Another aspect of the present disclosure relates to a method of reprogramming iPSCs, embryonic stem cells, or other types of stem or progenitor cells to certain types of somatic cells or progenitor cells, which can be used as disease models for drug screening, mechanism study, toxicity assay, or other research and drug discovery and development tools. For example, the method comprises exposing an iPSC, an embryonic stem cell, or a progenitor cell to a composition comprising a transducible material to reprogram the iPSC, embryonic stem cell, or progenitor cell to a transplantable somatic cell or a transplantable progenitor cell; transplanting the transplantable somatic cell or transplantable progenitor cell into a biological sample or a biological organism; developing the biological sample or biological organism to become a disease model. For another example, the method comprises reprogramming patient-specific cells to iPSCs using a transducible materials; further generating different type of cells from patient specific iPSCs with or without tranducible materials; and developing a disease model using patient-specific iPSCs or iPSC-derived cells. For another example, the method of developing drug screening or toxicity models comprises reprogramming somatic cells, progenitor cells, or multipotent cells to iPSCs using a transducible material; further generating different type of cells from iPSCs with or without exposing to transducible materials; and using iPSCs and/or iPSC-derived cells to screen the effects and/or toxicities of different compounds.

[0075] Another aspect of the present disclosure relates to a method of developing cell-based therapies for various diseases or conditions comprising the step of reprogramming an iPSC, an embryonic stem cell, or a progenitor cell to a transplantable somatic or progenitor cell using a transducible material; transplanting the transplantable somatic or progenitor cell into a biological sample or biological organism; assessing the therapeutic effect of the transplantable somatic or progenitor cell.

[0076] In another aspect, the present disclosure relates to a method for reprogramming a biological sample, comprising: exposing the biological sample to a tranducible material comprising an effector domain; and blocking the nuclear export of the transducible material. In certain embodiments, the nuclear export of the transducible material is blocked by mutated the NES of the effector domain. In certain embodiments, the nuclear export of the transducible material is blocked by exposing the biological sample to an agent that is capable of inhibiting nuclear export.

[0077] In yet another aspect, the present disclosure relates to a method for identifying a transducible material comprising an isolated polypeptide capable of transducing and retaining in a cell nucleus, wherein the isolated polypeptide comprises an effector domain, the method comprising: modifying the isolated polypeptide; introducing the modified isolated polypeptide into a biological sample; and observing the localization of the modified isolated polypeptide in the biological sample.

[0078] The following examples are provided to better illustrate the claimed invention and are not to be interpreted in any way as limiting the scope of the invention. All specific compositions, materials, and methods described below, in whole or in part, fall within the scope of the invention. These specific compositions, materials, and methods are not intended to limit the invention, but merely to illustrate specific embodiments falling within the scope of the invention. One skilled in the art may develop equivalent compositions, materials, and methods without the exercise of inventive capacity and without departing from the scope of the invention. It will be understood that many variations can be made in the procedures herein described while still remaining within the bounds of the invention. It is the intention of the inventors that such variations are included within the scope of the invention.

### EXAMPLE 1

[0079] The following is an example of identification of NES in a protein.

[0080] A NES is a short amino acid sequence in a protein that targets it for export from the cell nucleus to the cytoplasm. The classical NES is characterized by three to four conserved hydrophobic residues, usually leucine, and the spacing between them. A common classical NES has the consensus sequences of LX₍₁₋₃₎LX₍₂₋₃₎LXL, where L=Leu, X=spacing amino acid (i.e., any amino acid residue found in a polypeptide including alanine, arginine, asparagine, aspartic acid, cysteine, glutamic acid, glutamine, glycine, histidine, isoleucine, leucine, lysine, methionine, phenyalanine, proline, serine, threonine, tryptophan, tyrosine and valine). More recently, a consensus sequence of NES of [LIVFM-X₍₂₋₃₎-[LIVFM]-X-[LIVFM], where [LIVFM]=leucine, isoleucine, valinine, phenylalanine or methionine, X=spacing amino acid, has bee proposed (Fu et al., Prediction of leucine-rich nuclear export signal containing proteins with NESsential, Nucleic Acids Res., 39:e111 (2011)). Several databases has been established with collection of NES-containing proteins or for NES prediction, including NESbase, NetNES and ValidNESs.

[0081] Using NESbase, NetNES, ValidNESs or literature search, a number of nuclear proteins that comprises a NES were identified. (Table 2). In particular, using NetNES and similar tools, the presence of a NES in a protein can be predicted. The validation of the predicted NES can be achieved by methods known in the art. For example, a transgene can be prepared by fusing a reporter gene (e.g., GFP) to the gene of interest. The transgene can be expressed in a cell to observe the localization of the protein encoded by the gene of interest. The transgene can be mutated to replace the conserved hydrophobic amino acid residue (e.g., leucine) with alanine. The mutated transgene can then be expressed in a cell, and the localization of the mutated protein can be observed to determine whether the hydrophobic amino acid belong to a NES.

TABLE 2
Identification of NES
in nuclear proteins.

| Protein | SEQ | | | |
|---|---|---|---|---|
| Name | ID NO: | NES | | |
| Ascl1 | 1 | 167 | IRALQQLL | 174 |
| Baf60c | 2 | 268 | LARLLGL | 275 |
| Brn2 | 3 | 387 | LADSLQL | 393 |
| Brn4 | 4 | 311 | LADSLQL | 317 |
| Chd5 | 5 | 1648 | LDKLELSLI | 1656 |
| c-Myc | 6 | 442 | LKHKLEQL | 449 |
| Dlx1 | 7 | 161 | LASSLGL | 167 |
| Dlx2 | 8 | 185 | LAASLGL | 191 |
| Foxp1 | 9 | 62 | LQVARQLLL | 70 |
| Foxp2 | 10 | 44 | VSTVELLHL | 52, |
| | | 58 | LQAARQLLL | 66 |
| Foxp3 | 11 | 265 | LEQQLVLEKEKL | 276 |
| Gata4 | 12 | 44 | VPSSVLGLSYL | 54 |
| Hand1 | 13 | 130 | LSKIKTLRL | 138 |
| Hes1 | 14 | 54 | LSQLKTLIL | 62 |
| Hes5 | 15 | 36 | IEQLKLLL | 43 |
| Isl1 | 16 | 293 | VLSDFAL | 299 |
| Lhx2 | 17 | 75 | MRCLKCCECKLNL | 87 |
| Klf4 | 18 | 102 | LLDLDFIL | 109 |
| MafA | 19 | 293 | VEGLKL | 298 |
| Mef2c | 20 | 35 | LSVLCDCEIALII | 47 |
| Mesp1 | 21 | 123 | IETLRLAI | 130, |
| | | 133 | IGHLSAVLGL | 142 |
| MyoD | 22 | 43 | LLSPPLRDVDL | 13 |
| Myt1L | 23 | 249 | LSLDL | 253 |
| Nanog | 24 | 125 | MQELSNILNL | 134 |
| Nap1L2 | 25 | 268 | LLTDIKV | 274 |
| NeuroD1 | 26 | 137 | LSKIETLRL | 145 |
| NeuroD2 | 27 | 157 | LSKIETLRL | 165 |
| Ngn2 | 28 | 8 | LELKEEEDVLVLL | 20 |
| Ngn3 | 39 | 135 | LTQTLRI | 141 |
| Nhlh2 | 30 | 113 | LSKIEIL | 119 |
| Nkx2.2 | 31 | 53 | LDAVGSL | 59 |
| Nkx2.5 | 32 | 171 | LASVLKL | 177 |
| Nkx6.1 | 33 | 16 | LLSSPPLAALHSMAE | 30 |
| Npas4 | 34 | 35 | VRLSYLHI | 42 |
| Nrip3 | 35 | 170 | LVITLASLRL | 180, |
| | | 194 | LSLGLQTL | 201 |
| Oct4 | 36 | 190 | LQLSFKNMCKLRPLL | 204 |
| Oligo2 | 37 | 106 | LQQLRLKI | 113 |
| Pax6 | 38 | 243 | LAAKIDL | 249 |
| Pax7 | 39 | 152 | LVSSISRVLRI | 162 |
| Pdx1 | 40 | 81 | HLHHHLPAQLALP | 93 |
| Prdm8 | 41 | 117 | LRRIAKDEELL | 127 |
| Satb2 | 42 | 621 | ISLEALGIL | 629 |
| Shox2 | 43 | 339 | IADLRL | 344 |
| Sox2 | 44 | 70 | ISKRLGAEWKLL | 82 |
| Sox9 | 45 | 134 | ELSKTGKLWRLL | 146 |
| Tbr1 | 46 | 306 | FGKLKL | 311 |
| Tbx5 | 47 | 149 | LVSFQKLKL | 157 |
| Tbx18 | 48 | 239 | VISFDKLKL | 247 |
| Zic1 | 49 | 28 | VAERDVGLGI | 37 |

### EXAMPLE 2

[0082] The following is an example of characterization of a transducible material comprising an isolated polypeptide that comprises an effector domain with a mutated NES.

[0083] In this example, transducible materials derived from transcription factor Oct4 were generated, and their abilities in regulating the target gene of Oct4 were characterized.

[0084] Isolated polypeptides of sGFP (SEQ ID NO: 104), sGFP-Oct4-11R (SEQ ID NO: 155) and sGFP-Oct4(mNES)-11R (SEQ ID NO: 141) were prepared. These proteins were expressed in E. coli in inclusion body form, which were then solubilized, refolded, and further purified. For example, the strategy for obtaining each refolded polypeptide involves 6 steps: 1) growing E. coli carrying an expression plasmid, 2) inducing the synthesis of the expressed proteins as inclusion bodies, 3) purifying the inclusion bodies with freeze-thaw and detergent washing, 4) solubilizing the inclusion bodies in a 8 M urea buffer, 5) refolding the denatured protein to its native form using a refolding process, and 6) purifying the refolded protein using sizing column chromatographic procedures to separate correctly refolded protein from its partially or totally unfolded counterparts. The protein identities were confirmed by mass spectrometry and Western blot analysis.

[0085] HepG2 cells were treated with transducible materials comprising isolated polypeptide of sGFP, sGFP-Oct4-11R or sGFP-Oct4(mNES)-11R in serum-free medium for 6 hours. RNA was extracted from each sample using RNeasy Micro Kit from Qiagen and cDNA was synthesized through reverse transcription reaction. RT-qPCRs of five Oct4 target genes (Oct4, Sox2, Nanog, Smad3 and Smad4 were performed using a pair of primers specific to each target gene and a hydrolysis probe from Roche Universal ProbeLibrary on LightCycler 480 II. The expression of each gene was normalized by the expression level of GAPDH. The relative expression level of each gene in the control condition (sGFP-treated sample) was set as 1.00.

[0086] As shown in FIG. 2, transduction of sGFP-Oct4-11R does not increase the expression of Oct4 target genes. In contrast, sGFP-Oct4(mNES)-11R significantly increase the expression level of all five Oct4 target genes being tested.

### EXAMPLE 3

[0087] The following is an example of reprogramming cell fate using a tranducible material comprising an isolated polypeptide that comprises an effector domain with a mutated NES.

[0088] In this example, three versions of transducible materials derived from MyoD (the master myogenic transcription factor) were generated and their effects on reprogramming fibroblast cells into skeletal muscle progenitor cells (SMPCs) were compared. The methods for preparing the transducible materials were generally the same as that in Example 2.

[0089] In the first generation of transducible materials, a sGFP transduction domain and a poly-arginine (11R) were fused to the N-terminus and C-terminus of MyoD through a linker (SEQ ID NO: 99) respectively to generate sGFP-MyoD-11R (SEQ ID NO: 156). As shown in FIG. 5, after transduction of 10 μg/ml sGFP-MyoD-11R, high levels of sGFP-MyoD were found in more than 90% of fibroblasts at 24 hours after exposure to sGFP-MyoD in culture. However, majority of transduced sGFP-MyoD-11R were confined in the cytoplasm with minimal nuclear occupancy. The nuclear entry of sGFP-MyoD-11R was increased by using 100 μg/ml sGFP-MyoD-11R and electroporation, which successful reprogrammed very low percentage (around 10%) of FBs to MyoD+ myoblasts. However, the harsh condition of high concentrations of polypeptide and electroporation led to death of many fibroblasts.

[0090] The second generation of transducible materials, a strong classic nuclear localization sequence (cNLS), the SV40 T antigen NLS, was added in-between sGFP and MyoD-11R (SEQ ID NO: 157 and FIG. 3). As shown in FIG. 6, when tranduced with 10 μg/ml sGFP-NLS-MyoD-11R, more transducible materials were observed in nuclei of fibroblasts as compared to the first generation of tranducible materials. However, the nuclear occupancy of sGFP-NLS-MyoD-11R significantly decreased within 24 hours (FIG. 6B) and therefore led to low and inconsistent reprogramming of fibroblasts to SMPCs.

[0091] Leptomycin B (leptoB), a nuclear export blocker, was added at 5 nM to adult fibroblasts to enhance nuclear occupancy of sGFP-NLS-MyoD-11R. As shown in FIG. 6C, sGFP-NLS-MyoD-11R could stay in the nucleus slightly longer than 24 hours in the continuous presence of leptoB, but reprogramming efficiency of adult fibroblasts to SMPCs was still low (around 5%), likely due to the remaining nuclear export. Higher concentrations of leptoB might have off-target effects, which limits its use in enhancing nuclear retention of specific polypeptides.

[0092] In the third generation of transducible materials, the NES of MyoD was mutated to generate sGFP-NLS-MyoD(mNES)-11R (SEQ ID NO: 127 and FIG. 3) to further improve their nuclear occupancy and transcription efficiency. As shown in FIG. 7, sGFP-cNLS-MyoD(mNES)-11R could stay in the nucleus for 48-72 hours, which successfully converted >90% of adult fibroblasts to Pax7+/MyoD− satellite cells (SCs, FIG. 8A). The results indicated that nuclear occupancy of the transducible materials for longer than 48 hours was crucial for the success of reprogramming fibroblasts. These SCs were positive for Myf5 (>90% of SCs) at 22 days after transduction (FIG. 8B). Also, these SCs could be induced to differentiate to myoblasts with downregulation of Pax7 and upregulation of MyoD via a published myogenic protocol (Cosgrove et al, Rejuvenation of the muscle stem cell population restores strength to injured aged muscles, Nat Med., 20:255-64 (2014)). More importantly, sGFP-NLS-MyoD(mNES)-11R polypeptides that entered the cells were almost completely exported from nuclei to cytoplasm at >72 hours after transduction regardless of the existence of leptomycin B. Also, fluorescent imaging of the sGFP indicated that these third generation transducible materials were fully degraded after 2-3 weeks in culture (FIG. 8A). Thus, by using sGFP-NLS-MyoD(mNES)-11R, efficient fibroblasts conversion to SMPCs can be achieved in a controlled fashion. The risk of extensive durations of MyoD activation is completely avoided. Most myogenic analysis was performed at >2 weeks after polypeptide transduction to avoid confounding issues from added exogenous polypeptides. In summary, adult fibroblast can be successfully reprogrammed to SCs using sGFP-NLS-MyoD(mNES)-11R with defined kinetics (2-day nuclear occupancy and 2-3 week peptide lifespan).

[0093] While the invention has been particularly shown and described with reference to specific embodiments (some of which are preferred embodiments), it should be understood by those having skill in the art that various changes in form and detail may be made therein without departing from the spirit and scope of the present invention as disclosed herein.

1. A transducible material comprising an isolated polypeptide capable of transducing and retaining in a cell nucleus, said isolated polypeptide comprising an effector domain, wherein the effector domain comprises an amino acid sequence mutated from a nuclear export signal (NES).

2. (canceled)

3. The transducible material of claim 1, wherein the NES comprises an amino acid sequence of Y¹-X₍₂₋₃₎-Y²-X-Y³, wherein Y¹, Y² and Y³ are independently selected from the group consisting of leucine, isoleucine, valinine, phenylalanine and methionine, and X=spacing amino acid.

4. The transducible material of claim 3, wherein the NES comprises an amino acid residue sequence of LX₍₁₋₃₎LX₍₂₋₃₎LXL, wherein L=leucine and X=spacing amino acid.

5. The transducible material of claim 1, wherein the NES is mutated by replacing at least one of Y¹, Y² and Y³ with alanine.

6. The transducible material of claim 1, wherein the effector domain is derived from a protein selected from the group consisting of Ascl1, Baf60c, Bach2, Brg1, Brm, Brn2, Brn4, Chd5, cMyc, Dlx1, Dlx2, Ets2, Foxp1, Foxp2, Foxp3, Gata4, Hand1, Hes1, Hes5, Isl1, Lhx2, Lin28, Klf4 MafA, Mef2c, Mesp1, MyoD, Myt1L, Nanog, Nap1L2, NeuroD1, NeuroD2, Ngn2, Ngn3, Nhlh2, Nkx2.2, Nkx2.5, Nkx6.1, Npas4, Nrip3, Oct4, Oligo2, Pax6, Pax7, Pdx1, Prdm8, Satb2, Shox2, Sox2, Sox9, Tbr1, Tbx5, Tbx18 and Zic1.

7. The transducible material of claim 1, wherein the effector domain comprises an amino acid sequence selected from the group consisting of SEQ ID NO: 50-98.

8. The transducible material of claim 1, further comprising an agent that inhibits nuclear export.

9. The transducible material of claim 8, wherein the agent is leptomycin B.

10. The transducible material of claim 1, further comprising a nuclear localization signal (NLS).

11. The transducible material of claim 10, wherein the NLS is exogenous to the effector domain.

12. The transducible material of claim 11, wherein the NLS is linked to the effector domain covalently, non-covalently or via a linker.

13. The transducible material of claim 11, wherein the NLS is a SV40 large T antigen NLS, a c-Myc NLS or a nucleoplasmin NLS.

14. The transducible material of claim 1, further comprising a transduction domain.

15. The transducible material of claim 14, wherein the transduction domain is linked to the effector domain covalently, non-covalently or via a linker.

16. The transducible material of claim 14, wherein the transduction domain is selected from the group consisting of a protein transduction domain, a cell penetrating peptide, a cell permeating peptide, an activatable cell penetrating peptide, a cell-targeting peptide and a polymer.

17. The transducible material of claim 16 wherein the protein transduction domain is a supercharged protein.

18. The transducible material of claim 1, wherein the effector domain is inherently transducible.

19. The transducible material of claim 14, wherein the isolated polypeptide comprises an amino acid sequence of SEQ ID NO: 106-154.

20. A composition comprising a biological sample and the transducible material of claim 1, wherein the transducible material has transduced into the biological sample.

21. The composition of claim 20, wherein the biological sample is a cell, a tissue, or an organ from a biological organism.

22. A method for reprogramming a biological sample, comprising: exposing the biological sample to the transducible material of claim 1.

23. The method of claim 22, wherein the biological sample is reprogrammed so as to increase or decrease proliferation, change cell transcription network or metabolism, or to induce differentiation, transdifferentiation, retrodifferentiation, transdetermination, dedifferentiation, apoptosis or morphogenesis.

24. The method of claim 22, wherein the biological sample is a cell, wherein the cell is reprogrammed to change from a first type cell to a second type cell.

25. The method of claim 24, wherein the first type cell is a fibroblast and the second type cell is a muscle progenitor cell.

26-30. (canceled)

The application's sequence listing, which the Patent Office published only in electronic form, follows.

SEQUENCE LISTING (158 sequences)

SEQ ID NO: 1 - protein, 236 aa, Homo sapiens
MESSAKMESGGAGQQPQPQPQQPFLPPAACFFATAAAAAAAAAAAAAQSAQQQQQQQQQQQQAPQLRPAADGQPSGGGHKSAPKQVKRQRSSSPELMRCKRRLNFSGFGYSLPQQQPAAVARRNERERNRVKLVNLGFATLREHVPNGAANKKMSKVETLRSAVEYIRALQQLLDEHDAVSAAFQAGVLSPTISPNYSNDLNSMAGSPVSSYSSDEGSYDPLSPEEQELLDFTNWF

SEQ ID NO: 2 - protein, 483 aa, Homo sapiens
MAADEVAGGARKATKSKLFEFLVHGVRPGMPSGARMPHQGAPMGPPGSPYMGSPAVRPGLAPAGMEPARKRAAPPPGQSQAQSQGQPVPTAPARSRSAKRRKMADKILPQRIRELVPESQAYMDLLAFERKLDQTIMRKRVDIQEALKRPMKQKRKLRLYISNTFNPAKPDAEDSDGSIASWELRVEGKLLDDPSKQKRKFSSFFKSLVIELDKDLYGPDNHLVEWHRTPTTQETDGFQVKRPGDLSVRCTLLLMLDYQPPQFKLDPRLARLLGLHTQSRSAIVQALWQYVKTNRLQDSHDKEYINGDKYFQQIFDCPRLKFSEIPQRLTALLLPPDPIVINHVISVDPSDQKKTACYDIDVEVEEPLKGQMSSFLLSTANQQEISALDSKIHETIESINQLKIQRDFMLSFSRDPKGYVQDLLRSQSRDLKVMTDVAGNPEEERRAEFYHQPWSQEAVSRYFYCKIQQRRQELEQSLVVRNT

SEQ ID NO: 3 - protein, 443 aa, Homo sapiens
MATAASNHYSLLTSSASIVHAEPPGGMQQGAGGYREAQSLVQGDYGALQSNGHPLSHAHQWITALSHGGGGGGGGGGGGGGGGGGGGGDGSPWSTSPLGQPDIKPSVVVQQGGRGDELHGPGALQQQHQQQQQQQQQQQQQQQQQQQQQRPPHLVHHAANHHPGPGAWRSAAAAAHLPPSMGASNGGLLYSQPSFTVNGMLGAGGQPAGLHHHGLRDAHDEPHHADHHPHPHSHPHQQPPPPPPPQGPPGHPGAHHDPHSDEDTPTSDDLEQFAKQFKQRRIKLGFTQADVGLALGTLYGNVFSQTTICRFEALQLSFKNMCKLKPLLNKWLEEADSSSGSPTSIDKIAAQGRKRKKRTSIEVSVKGALESHFLKCPKPSAQEITSLADSLQLEKEVVRVWFCNRRQKEKRMTPPGGTLPGAEDVYGGSRDTPPHHGVQTPVQ

SEQ ID NO: 4 - protein, 361 aa, Homo sapiens
MATAASNPYSILSSTSLVHADSAGMQQGSPFRNPQKLLQSDYLQGVPSNGHPLGHHWVTSLSDGGPWSSTLATSPLDQQDVKPGREDLQLGAIIHHRSPHVAHHSPHTNHPNAWGASPAPNPSITSSGQPLNVYSQPGFTVSGMLEHGGLTPPPAAASAQSLHPVLREPPDHGELGSHHCQDHSDEETPTSDELEQFAKQFKQRRIKLGFTQADVGLALGTLYGNVFSQTTICRFEALQLSFKNMCKLKPLLNKWLEEADSSTGSPTSIDKIAAQGRKRKKRTSIEVSVKGVLETHFLKCPKPAAQEISSLADSLQLEKEVVRVWFCNRRQKEKRMTPPGDQQPHEVYSHTVKTDTSCHDL

SEQ ID NO: 5 - protein, 1954 aa, Homo sapiens
MRGPVGTEEELPRLFAEEMENEDEMSEEEDGGLEAFDDFFPVEPVSLPKKKKPKKLKENKCKGKRKKKEGSNDELSENEEDLEEKSESEGSDYSPNKKKKKKLKDKKEKKAKRKKKDEDEDDNDDGCLKEPKSSGQLMAEWGLDDVDYLFSEEDYHTLTNYKAFSQFLRPLIAKKNPKIPMSKMMTVLGAKWREFSANNPFKGSSAAAAAAAVAAAVETVTISPPLAVSPPQVPQPVPIRKAKTKEGKGPGVRKKIKGSKDGKKKGKGKKTAGLKFRFGGISNKRKKGSSSEEDEREESDFDSASIHSASVRSECSAALGKKSKRRRKKKRIDDGDGYETDHQDYCEVCQQGGEIILCDTCPRAYHLVCLDPELEKAPEGKWSCPHCEKEGIQWEPKDDDDEEEEGGCEEEEDDHMEFCRVCKDGGELLCCDACPSSYHLHCLNPPLPEIPNGEWLCPRCTCPPLKGKVQRILHWRWTEPPAPFMVGLPGPDVEPSLPPPKPLEGIPEREFFVKWAGLSYWHCSWVKELQLELYHTVMYRNYQRKNDMDEPPPFDYGSGDEDGKSEKRKNKDPLYAKMEERFYRYGIKPEWMMIHRILNHSFDKKGDVHYLIKWKDLPYDQCTWEIDDIDIPYYDNLKQAYWGHRELMLGEDTRLPKRLLKKGKKLRDDKQEKPPDTPIVDPTVKFDKQPWYIDSTGGTLHPYQLEGLNWLRFSWAQGTDTILADEMGLGKTVQTIVFLYSLYKEGHSKGPYLVSAPLSTIINWEREFEMWAPDFYVVTYTGDKESRSVIRENEFSFEDNAIRSGKKVFRMKKEVQIKFHVLLTSYELITIDQAILGSIEWACLVVDEAHRLKNNQSKFFRVLNSYKIDYKLLLTGTPLQNNLEELFHLLNFLTPERFNNLEGFLEEFADISKEDQIKKLHDLLGPHMLRRLKADVFKNMPAKTELIVRVELSQMQKKYYKFILTRNFEALNSKGGGNQVSLLNIMMDLKKCCNHPYLFPVAAVEAPVLPNGSYDGSSLVKSSGKLMLLQKMLKKLRDEGHRVLIFSQMTKMLDLLEDFLEYEGYKYERIDGGITGGLRQEAIDRFNAPGAQQFCFLLSTRAGGLGINLATADTVIIYDSDWNPHNDIQAFSRAHRIGQNKKVMIYRFVTRASVEERITQVAKRKMMLTHLVVRPGLGSKSGSMTKQELDDILKFGTEELFKDDVEGMMSQGQRPVTPIPDVQSSKGGNLAASAKKKHGSTPPGDNKDVEDSSVIHYDDAAISKLLDRNQDATDDTELQNMNEYLSSFKVAQYVVREEDGVEEVEREIIKQEENVDPDYWEKLLRHHYEQQQEDLARNLGKGKRIRKQVNYNDASQEDQEWQDELSDNQSEYSIGSEDEDEDFEERPEGQSGRRQSRRQLKSDRDKPLPPLLARVGGNIEVLGFNARQRKAFLNAIMRWGMPPQDAFNSHWLVRDLRGKSEKEFRAYVSLFMRHLCEPGADGAETFADGVPREGLSRQHVLTRIGVMSLVRKKVQEFEHVNGKYSTPDLIPEGPEGKKSGEVISSDPNTPVPASPAHLLPAPLGLPDKMEAQLGYMDEKDPGAQKPRQPLEVQALPAALDRVESEDKHESPASKERAREERPEETEKAPPSPEQLPREEVLPEKEKILDKLELSLIHSRGDSSELRPDDTKAEEKEPIETQQNGDKEEDDEGKKEDKKGKFKFMFNIADGGFTELHTLWQNEERAAVSSGKIYDIWHRRHDYWLLAGIVTHGYARWQDIQNDPRYMILNEPFKSEVHKGNYLEMKNKFLARRFKLLEQALVIEEQLRRAAYLNMTQDPNHPAMALNARLAEVECLAESHQHLSKESLAGNKPANAVLHKVLNQLEELLSDMKADVTRLPSMLSRIPPVAARLQMSERSILSRLTNRAGDPTIQQGAFGSSQMYSNNFGPNFRGPGPGGIVNYNQMPLGPYVTDI

SEQ ID NO: 6 - protein, 454 aa, Homo sapiens
MDFFRVVENQQPPATMPLNVSFTNRNYDLDYDSVQPYFYCDEEENFYQQQQQSELQPPAPSEDIWKKFELLPTPPLSPSRRSGLCSPSYVAVTPFSLRGDNDGGGGSFSTADQLEMVTELLGGDMVNQSFICDPDDETFIKNIIIQDCMWSGFSAAAKLVSEKLASYQAARKDSGSPNPARGHSVCSTSSLYLQDLSAAASECIDPSVVFPYPLNDSSSPKSCASQDSSAFSPSSDSLLSSTESSPQGSPEPLVLHEETPPTTSSDSEEEQEDEEEIDVVSVEKRQAPGKRSESGSPSAGGHSKPPHSPLVLKRCHVSTHQHNYAAPPSTRKDYPAAKRVKLDSVRVLRQISNNRKCTSPRSSDTEENVKRRTHNVLERQRRNELKRSFFALRDQIPELENNEKAPKVVILKKATAYILSVQAEEQKLISEEDLLRKRREQLKHKLEQLRNSCA

SEQ ID NO: 7 - protein, 255 aa, Homo sapiens
MTMTTMPESLNSPVSGKAVFMEFGPPNQQMSPSPMSHGHYSMHCLHSAGHSQPDGAYSSASSFSRPLGYPYVNSVSSHASSPYISSVQSYPGSASLAQSRLEDPGADSEKSTVVEGGEVRFNGKGKKIRKPRTIYSSLQLQALNRRFQQTQYLALPERAELAASLGLTQTQVKIWFQNKRSKFKKLMKQGGAALEGSALANGRALSAGSPPVPPGWNPNSSSGKGSGGNAGSYIPSYTSWYPSAHQEAMQQPQLM

SEQ ID NO: 8 - protein, 328 aa, Homo sapiens
MTGVFDSLVADMHSTQIAASSTYHQHQQPPSGGGAGPGGNSSSSSSLHKPQESPTLPVSTATDSSYYTNQQHPAGGGGGGGSPYAHMGSYQYQASGLNNVPYSAKSSYDLGYTAAYTSYAPYGTSSSPANNEPEKEDLEPEIRIVNGKPKKVRKPRTIYSSFQLAALQRRFQKTQYLALPERAELAASLGLTQTQVKIWFQNRRSKFKKMWKSGEIPSEQHPGASASPPCASPPVSAPASWDFGVPQRMAGGGGPGSGGSGAGSSGSSPSSAASAFLGNYPWYHQTSGSASHLQATAPLLHPTQTPQPHHHHHHHGGGGAPVSAGTIF

SEQ ID NO: 9 - protein, 677 aa, Homo sapiens
MMQESGTETKSNGSAIQNGSGGSNHLLECGGLREGRSNGETPAVDIGAADLAHAQQQQQQALQVARQLLLQQQQQQQVSGLKSPKRNDKQPALQVPVSVAMMTPQVITPQQMQQILQQQVLSPQQLQVLLQQQQALMLQQQQLQEFYKKQQEQLQLQLLQQQHAGKQPKEQQQVATQQLAFQQQLLQMQQLQQQHLLSLQRQGLLTIQPGQPALPLQPLAQGMIPTELQQLWKEVTSAHTAEETTGNNHSSLDLTTTCVSSSAPSKTSLIMNPHASTNGQLSVHTPKRESLSHEEHPHSHPLYGHGVCKWPGCEAVCEDFQSFLKHLNSEHALDDRSTAQCRVQMQVVQQLELQLAKDKERLQAMMTHLHVKSTEPKAAPQPLNLVSSVTLSKSASEASPQSLPHTPTTPTAPLTPVTQGPSVITTTSMHTVGPIRRRYSDKYNVPISSADIAQNQEFYKNAEVRPPFTYASLIRQAILESPEKQLTLNEIYNWFTRMFAYFRRNAATWKNAVRHNLSLHKCFVRVENVKGAVWTVDEVEFQKRRPQKISGNPSLIKNMQSSHAYCTPLNAALQASMAENSIPLYTTASMGNPTLGNLASAIREELNGAMEHTNSNESDSSPGRSPMQAVHPVHVKEEPLDPEEAEGPLSLVTTANHSPDFDHDRDYEDEPVNEDME

SEQ ID NO: 10 - protein, 714 aa, Homo sapiens
MMQESATETISNSSMNQNGMSTLSSQLDAGSRDGRSSGDTSSEVSTVELLHLQQQQALQAARQLLLQQQTSGLKSPKSSDKQRPLQVPVSVAMMTPQVITPQQMQQILQQQVLSPQQLQALLQQQQAVMLQQQQLQEFYKKQQEQLHLQLLQQQQQQQQQQQQQQQQQQQQQQQQQQQQQQQQQQQQQQQQHPGKQAKEQQQQQQQQQLAAQQLVFQQQLLHMQQLQQQQHLLSLQRQGLISIPPGQAALPVQSLPQAGLSPAEIQQLWKEVTGVHSMEDNGIKHGGLDLTTNNSSSTTSSNTSKASPPITHHSIVNGQSSVLSARRDSSSHEETGASHTLYGHGVCKWPGCESICEDFGQFLKHLNNEHALDDRSTAQCRVQMQVVQQLEIQLSKERERLQAMMTHLHMRPSEPKPSPKPLNLVSSVTMSKNMLETSPQSLPQTPTTPTAPVTPITQGPSVITPASVPNVGAIRRRHSDKYNIPMSSEIAPNYEFYKNADVRPPFTYATLIRQAIMESSDRQLTLNEIYSWFTRTFAYFRRNAATWKNAVRHNLSLHKCFVRVENVKGAVWTVDEVEYQKRRSQKITGSPTLVKNIPTSLGYGAALNASLQAALAESSLPLLSNPGLINNASSGLLQAVHEDLNGSLDHIDSNGNSSPGCSPQPHIHSIHVKEEPVIAEDEDCPMSLVTTANHSPELEDDREIEEEPLSEDLE

SEQ ID NO: 11 - protein, 454 aa, Homo sapiens
MPNPRPGKPSAPSLALGPSPGASPSWRAAPKASDLLGARGPGGTFQGRDLRGGAHASSSSLNPMPPSQLQLPTLPLVMVAPSGARLGPLPHLQALLQDRPHFMHQLSTVDAHARTPVLQVHPLESPAMISLTPPTTATGVFSLKARPGLPPGINVASLEWVSREPALLCTFPNPSAPRKDRSVDRAGKDPRPPIPSPDTLCPPSTLSAVPQSSYPLLANGVCKWPGCEKVFEEPEDFLKHCQADHLLDEKGRAQCLLQREMVQSLEQQLVLEKEKLSAMQAHLAGKMALTKASSVASSDKGSCCIVAAGSQGPVVPAWSGPREAPDSLFAVRRHLWGSHGNSTFPEFLHNMDYFKFHNMRPPFTYATLIRWAILEAPEKQRTLNEIYHWFTRMFAFFRNHPATWKNAIRHNLSLHKCFVRVESEKGAVWTVDELEFRKKRSQRPSRCSNPTPGP

SEQ ID NO: 12 - protein, 443 aa, Homo sapiens
MYQSLAMAANHGPPPGAYEAGGPGAFMHGAGAASSPVYVPTPRVPSSVLGLSYLQGGGAGSASGGASGGSSGGAASGAGPGTQQGSPGWSQAGADGAAYTPPPVSPRFSFPGTTGSLAAAAAAAAAREAAAYSSGGGAAGAGLAGREQYGRAGFAGSYSSPYPAYMADVGASWAAAAAASAGPFDSPVLHSLPGRANPAARHPNLVDMFDDFSEGRECVNCGAMSTPLWRRDGTGHYLCNACGLYHKMNGINRPLIKPQRRLSASRRVGLSCANCQTTTTTLWRRNAEGEPVCNACGLYMKLHGVPRPLAMRKEGIQTRKRKPKNLNKSKTPAAPSGSESLPPASGASSNSSNATTSSSEEMRPIKTEPGLSSHYGHSSSVSQTFSVSAMSGHGPSIHPVLSALKLSPQGYASPVSQSPQTSSKQDSWNSLVLADSHGDIITA

SEQ ID NO: 13 - protein, 215 aa, Homo sapiens
MNLVGSYAHHHHHHHPHPAHPMLHEPFLFGPASRCHQERPYFQSWLLSPADAAPDFPAGGPPPAAAAAATAYGPDARPGQSPGRLEALGGRLGRRKGSGPKKERRRTESINSAFAELRECIPNVPADTKLSKIKTLRLATSYIAYLMDVLAKDAQSGDPEAFKAELKKADGGRESKRKRELQQHEGFPPALGPVEKRIKGRTGWPQQVWALELNQ

SEQ ID NO: 14 - protein, 280 aa, Homo sapiens
MPADIMEKNSSSPVAATPASVNTTPDKPKTASEHRKSSKPIMEKRRRARINESLSQLKTLILDALKKDSSRHSKLEKADILEMTVKHLRNLQRAQMTAALSTDPSVLGKYRAGFSECMNEVTRFLSTCEGVNTEVRTRLLGHLANCMTQINAMTYPGQPHPALQAPPPPPPGPGGPQHAPFAPPPPLVPIPGGAAPPPGGAPCKLGSQAGEAAKVFGGFQVVPAPDGQFAFLIPNGAFAHSGPVIPVYTSNSGTSVGPNAVSPSSGPSLTADSMWRPWRN

SEQ ID NO: 15 - protein, 166 aa, Homo sapiens
MAPSTVAVELLSPKEKNRLRKPVVEKMRRDRINSSIEQLKLLLEQEFARHQPNSKLEKADILEMAVSYLKHSKAFVAAAGPKSLHQDYSEGYSWCLQEAVQFLTLHAASDTQMKLLYHFQRPPAAPAAPAKEPKAPGAAPPPALSAKATAAAAAAHQPACGLWRPW

SEQ ID NO: 16 - protein, 349 aa, Homo sapiens
MGDMGDPPKKKRLISLCVGCGNQIHDQYILRVSPDLEWHAACLKCAECNQYLDESCTCFVRDGKTYCKRDYIRLYGIKCAKCSIGFSKNDFVMRARSKVYHIECFRCVACSRQLIPGDEFALREDGLFCRADHDVVERASLGAGDPLSPLHPARPLQMAAEPISARQPALRPHVHKQPEKTTRVRTVLNEKQLHTLRTCYAANPRPDALMKEQLVEMTGLSPRVIRVWFQNKRCKDKKRSIMMKQLQQQQPNDKTNIQGMTGTPMVAASPERHDGGLQANPVEVQSYQPPWKVLSDFALQSDIDQPAFQQLVNFSEGGPGSNSTGSEVASMSSQLPDTPNSMVASPIEA

SEQ ID NO: 17 - protein, 406 aa, Homo sapiens
MLFHSLSGPEVHGVIDEMDRRAKSEAPAISSAIDRGDTETTMPSISSDRAALCAGCGGKISDRYYLLAVDKQWHMRCLKCCECKLNLESELTCFSKDGSIYCKEDYYRRFSVQRCARCHLGISASEMVMRARDLVYHLNCFTCTTCNKMLTTGDHFGMKDSLVYCRLHFEALLQGEYPAHFNHADVAAAAAAAAAAKSAGLGAAGANPLGLPYYNGVGTVQKGRPRKRKSPGPGADLAAYNAALSCNENDAEHLDRDQPYPSSQKTKRMRTSFKHHQLRTMKSYFAINHNPDAKDLKQLAQKTGLTKRVLQVWFQNARAKFRRNLLRQENTGVDKSTDAALQTGTPSGPASELSNASLSPSSTPTTLTDLTSPTLPTVTSVLTSVPGNLEGHEPHSPSQTTLTNLF

SEQ ID NO: 18 - protein, 479 aa, Homo sapiens
MRQPPGESDMAVSDALLPSFSTFASGPAGREKTLRQAGAPNNRWREELSHMKRLPPVLPGRPYDLAAATVATDLESGGAGAACGGSNLAPLPRRETEEFNDLLDLDFILSNSLTHPPESVAATVSSSASASSSSSPSSSGPASAPSTCSFTYPIRAGNDPGVAPGGTGGGLLYGRESAPPPTAPFNLADINDVSPSGGFVAELLRPELDPVYIPPQQPQPPGGGLMGKFVLKASLSAPGSEYGSPSVISVSKGSPDGSHPVVVAPYNGGPPRTCPKIKQEAVSSCTHLGAGPPLSNGHRPAAHDFPLGRQLPSRTTPTLGLEEVLSSRDCHPALPLPPGFHPHPGPNYPSFLPDQMQPQVPPLHYQELMPPGSCMPEEPKPKRGRRSWPRKRTATHTCDYAGCGKTYTKSSHLKAHLRTHTGEKPYHCDWDGCGWKFARSDELTRHYRKHTGHRPFQCQKCDRAFSRSDHLALHMKRHF

SEQ ID NO: 19 - protein, 353 aa, Homo sapiens
MAAELAMGAELPSSPLAIEYVNDFDLMKFEVKKEPPEAERFCHRLPPGSLSSTPLSTPCSSVPSSPSFCAPSPGTGGGGGAGGGGGSSQAGGAPGPPSGGPGAVGGTSGKPALEDLYWMSGYQHHLNPEALNLTPEDAVEALIGSGHHGAHHGAHHPAAAAAYEAFRGPGFAGGGGADDMGAGHHHGAHHAAHHHHAAHHHHHHHHHHGGAGHGGGAGHHVRLEERFSDDQLVSMSVRELNRQLRGFSKEEVIRLKQKRRTLKNRGYAQSCRFKRVQQRHILESEKCQLQSQVEQLKLEVGRLAKERDLYKEKYEKLAGRGGPGSAGGAGFPREPSPPQAGPGGAKGTADFFL

SEQ ID NO: 20 - protein, 473 aa, Homo sapiens
MGRKKIQITRIMDERNRQVTFTKRKFGLMKKAYELSVLCDCEIALIIFNSTNKLFQYASTDMDKVLLKYTEYNEPHESRTNSDIVETLRKKGLNGCDSPDPDADDSVGHSPESEDKYRKINEDIDLMISRQRLCAVPPPNFEMPVSIPVSSHNSLVYSNPVSSLGNPNLLPLAHPSLQRNSMSPGVTHRPPSAGNTGGLMGGDLTSGAGTSAGNGYGNPRNSPGLLVSPGNLNKNMQAKSPPPMNLGMNNRKPDLRVLIPPGSKNTMPSVSEDVDLLLNQRINNSQSAQSLATPVVSVATPTLPGQGMGGYPSAISTTYGTEYSLSSADLSSLSGFNTASALHLGSVTGWQQQHLHNMPPSALSQLGACTSTHLSQSSNLSLPSTQSLNIKSEPVSPPRDRTTTPSRYPQHTRHEAGRSPVDSLSSCSSSYDGSDREDHRNEFHSPIGLTRPSPDERESPSVKRMRLSEGWAT

SEQ ID NO: 21 - protein, 268 aa, Homo sapiens
MAQPLCPPLSESWMLSAAWGPTRRPPPSDKDCGRSLVSSPDSWGSTPADSPVASPARPGTLRDPRAPSVGRRGARSSRLGSGQRQSASEREKLRMRTLARALHELRRFLPPSVAPAGQSLTKIETLRLAIRYIGHLSAVLGLSEESLQRRCRQRGDAGSPRGCPLCPDDCPAQMQTRTQAEGQGQGRGLGLVSAVRAGASWGSPPACPGARAAPEPRDPPALFAEAACPEGQAMEPSPPSPLLPGDVLALLETWMPLSPLEWLPEEPK

SEQ ID NO: 22 - protein, 320 aa, Homo sapiens
MELLSPPLRDVDLTAPDGSLCSFATTDDFYDDPCFDSPDLRFFEDLDPRLMHVGALLKPEEHSHFPAAVHPAPGAREDEHVRAPSGHHQAGRCLLWACKACKRKTTNADRRKAATMRERRRLSKVNEAFETLKRCTSSNPNQRLPKVEILRNAIRYIEGLQALLRDQDAAPPGAAAAFYAPGPLPPGRGGEHYSGDSDASSPRSNCSDGMMDYSGPPSGARRRNCYEGAYYNEAPSEPRPGKSAAVSSLDCLSSIVERISTESPAAPALLLADVPSESPPRRQEAAAPSEGESSGDPTQSPDAAPQCPAGANPNPIYQVL

SEQ ID NO: 23 - protein, 1184 aa, Homo sapiens
MEVDTEEKRHRTRSKGVRVPVEPAIQELFSCPTPGCDGSGHVSGKYARHRSVYGCPLAKKRKTQDKQPQEPAPKRKPFAVKADSSSVDECDDSDGTEDMDEKEEDEGEEYSEDNDEPGDEDEEDEEGDREEEEEIEEEDEDDDEDGEDVEDEEEEEEEEEEEEEEEENEDHQMNCHNTRIMQDTEKDDNNNDEYDNYDELVAKSLLNLGKIAEDAAYRARTESEMNSNTSNSLEDDSDKNENLGRKSELSLDLDSDVVRETVDSLKLLAQGHGVVLSENMNDRNYADSMSQQDSRNMNYVMLGKPMNNGLMEKMVEESDEEVCLSSLECLRNQCFDLARKLSETNPQERNPQQNMNIRQHVRPEEDFPGRTPDRNYSDMLNLMRLEEQLSPRSRVFASCAKEDGCHERDDDTTSVNSDRSEEVFDMTKGNLTLLEKAIALETERAKAMREKMAMEAGRRDNMRSYEDQSPRQLPGEDRKPKSSDSHVKKPYYDPSRTEKKESKCPTPGCDGTGHVTGLYPHHRSLSGCPHKDRVPPEILAMHESVLKCPTPGCTGRGHVNSNRNSHRSLSGCPIAAAEKLAKAQEKHQSCDVSKSSQASDRVLRPMCFVKQLEIPQYGYRNNVPTTTPRSNLAKELEKYSKTSFEYNSYDNHTYGKRAIAPKVQTRDISPKGYDDAKRYCKDPSPSSSSTSSYAPSSSSNLSCGGGSSASSTCSKSSFDYTHDMEAAHMAATAILNLSTRCREMPQNLSTKPQDLCATRNPDMEVDENGTLDLSMNKQRPRDSCCPILTPLEPMSPQQQAVMNNRCFQLGEGDCWDLPVDYTKMKPRRIDEDESKDITPEDLDPFQEALEERRYPGEVTIPSPKPKYPQCKESKKDLITLSGCPLADKSIRSMLATSSQELKCPTPGCDGSGHITGNYASHRSLSGCPRAKKSGIRIAQSKEDKEDQEPIRCPVPGCDGQGHITGKYASHRSASGCPLAAKRQKDGYLNGSQFSWKSVKTEGMSCPTPGCDGSGHVSGSFLTHRSLSGCPRATSAMKKAKLSGEQMLTIKQRASNGIENDEEIKQLDEEIKELNESNSQMEADMIKLRTQITTMESNLKTIEEENKVIEQQNESLLHELANLSQSLIHSLANIQLPHMDPINEQNFDAYVTTLTEMYTNQDRYQSPENKALLENIKQAVRGIQV

SEQ ID NO: 24 - protein, 305 aa, Homo sapiens
MSVDPACPQSLPCFEASDCKESSPMPVICGPEENYPSLQMSSAEMPHTETVSPLPSSMDLLIQDSPDSSTSPKGKQPTSAEKSVAKKEDKVPVKKQKTRTVFSSTQLCVLNDRFQRQKYLSLQQMQELSNILNLSYKQVKTWFQNQRMKSKRWQKNNWPKNSNGVTQKASAPTYPSLYSSYHQGCLVNPTGNLPMWSNQTWNNSTWSNQTQNIQSWSNHSWNTQTWCTQSWNNQAWNSPFYNCGEESLQSCMQFQPNSPASDLEAALEAAGEGLNVIQQTTRYFSTPQTMDLFLNYSMNMQPEDV

SEQ ID NO: 25 - protein, 460 aa, Homo sapiens
MAESENRKELSESSQEEAGNQIMVEGLGEHLERGEDAAAGLGDDGKCGEEAAAGLGEEGENGEDTAAGSGEDGKKGGDTDEDSEADRPKGLIGYVLDTDFVESLPVKVKYRVLALKKLQTRAANLESKFLREFHDIERKFAEMYQPLLEKRRQIINAIYEPTEEECEYKSDSEDCDDEEMCHEEMYGNEEGMVHEYVDEDDGYEDYYYDYAVEEEEEEEEEDDIEATGEENKEEEDPKGIPDFWLTVLKNVDTLTPLIKKYDEPILKLLTDIKVKLSDPGEPLSFTLEFHFKPNEYFKNELLTKTYVLKSKLAYYDPHPYRGTAIEYSTGCEIDWNEGKNVTLKTIKKKQKHRIWGTIRTVTEDFPKDSFFNFFSPHGITSNGRDGNDDFLLGHNLRTYIIPRSVLFFSGDALESQQEGVVREVNDAIYDKIIYDNWMAAIEEVKACCKNLEALVEDIDR

SEQ ID NO: 26 - protein, 356 aa, Homo sapiens
MTKSYSESGLMGEPQPQGPPSWTDECLSSQDEEHEADKKEDDLEAMNAEEDSLRNGGEEEDEDEDLEEEEEEEEEDDDQKPKRRGPKKKKMTKARLERFKLRRMKANARERNRMHGLNAALDNLRKVVPCYSKTQKLSKIETLRLAKNYIWALSEILRSGKSPDLVSFVQTLCKGLSQPTTNLVAGCLQLNPRTFLPEQNQDMPPHLPTASASFPVHPYSYQSPGLPSPPYGTMDSSHVFHVKPPPHAYSAALEPFFESPLTDCTSPSFDGPLSPPLSINGNFSFKHEPSAEFEKNYAFTMHYPAATLAGAQSHGSIFSGTAAPRCEIPIDNIMSFDSHSHHERVMSAQLNAIFHD

SEQ ID NO: 27 - protein, 382 aa, Homo sapiens
MLTRLFSEPGLLSDVPKFASWGDGEDDEPRSDKGDAPPPPPPAPGPGAPGPARAAKPVPLRGEEGTEATLAEVKEEGELGGEEEEEEEEEEGLDEAEGERPKKRGPKKRKMTKARLERSKLRRQKANARERNRMHDLNAALDNLRKVVPCYSKTQKLSKIETLRLAKNYIWALSEILRSGKRPDLVSYVQTLCKGLSQPTTNLVAGCLQLNSRNFLTEQGADGAGRFHGSGGPFAMHPYPYPCSRLAGAQCQAAGGLGGGAAHALRTHGYCAAYETLYAAAGGGGASPDYNSSEYEGPLSPPLCLNGNFSLKQDSSPDHEKSYHYSMHYSALPGSRPTGHGLVFGSSAVRGGVHSENLLSYDMHLHHDRGPMYEELNAFFHN

SEQ ID NO: 28 - protein, 272 aa, Homo sapiens
MFVKSETLELKEEEDVLVLLGSASPALAALTPLSSSADEEEEEEPGASGGARRQRGAEAGQGARGGVAAGAEGCRPARLLGLVHDCKRRPSRARAVSRGAKTAETVQRIKKTRRLKANNRERNRMHNLNAALDALREVLPTFPEDAKLTKIETLRFAHNYIWALTETLRLADHCGGGGGGLPGALFSEAVLLSPGGASAALSSSGDSPSPASTWSCTNSPAPSSSVSSNSTSPYSCTLSPASPAGSDMDYWQPPPPDKHRYAPHLPIARDCI

SEQ ID NO: 29 - protein, 214 aa, Homo sapiens
MTPQPSGAPTVQVTRETERSFPRASEDEVTCPTSAPPSPTRTRGNCAEAEEGGCRGAPRKLRARRGGRSRPKSELALSKQRRSRRKKANDRERNRMHNLNSALDALRGVLPTFPDDAKLTKIETLRFAHNYIWALTQTLRIADHSLYALEPPAPHCGELGSPGGSPGDWGSLYSPVSQAGSLSPAASLEERPGLLGATFSACLSPGSLAFSDFL

SEQ ID NO: 30 - protein, 135 aa, Homo sapiens
MMLSPDQAADSDHPSSAHSDPESLGGTDTKVLGSVSDLEPVEEAEGDGKGGSRAALYPHPQQLSREEKRRRRRATAKYRSAHATRERIRVEAFNLAFAELRKLLPTLPPDKKLSKIEILRLAICYISYLNHVLDV

SEQ ID NO: 31 - protein, 273 aa, Homo sapiens
MSLTNTKTGFSVKDILDLPDTNDEEGSVAEGPEEENEGPEPAKRAGPLGQGALDAVQSLPLKNPFYDSSDNPYTRWLASTEGLQYSLHGLAAGAPPQDSSSKSPEPSADESPDNDKETPGGGGDAGKKRKRRVLFSKAQTYELERRFRQQRYLSAPEREHLASLIRLTPTQVKIWFQNHRYKMKRARAEKGMEVTPLPSPRRVAVPVLVRDGKPCHALKAQDLAAATFQAGIPFSAYSAQSLQHMQYNAQYSSASTPQYPTAHPLVQAQQWTW

SEQ ID NO: 32 - protein, 324 aa, Homo sapiens
MFPSPALTPTPFSVKDILNLEQQQRSLAAAGELSARLEATLAPSSCMLAAFKPEAYAGPEAAAPGLPELRAELGRAPSPAKCASAFPAAPAFYPRAYSDPDPAKDPRAEKKELCALQKAVELEKTEADNAERPRARRRRKPRVLFSQAQVYELERRFKQQRYLSAPERDQLASVLKLTSTQVKIWFQNRRYKCKRQRQDQTLELVGLPPPPPPPARRIAVPVLVRDGKPCLGDSAPYAPAYGVGLNPYGYNAYPAYPGYGGAACSPGYSCTAAYPAGPSPAQPATAAANNNFVNFGVGDLNAVQSPGIPQSNSGVSTLHGIRAW

SEQ ID NO: 33 - protein, 367 aa, Homo sapiens
MLAVGAMEGTRQSAFLLSSPPLAALHSMAEMKTPLYPAAYPPLPAGPPSSSSSSSSSSSPSPPLGTHNPGGLKPPATGGLSSLGSPPQQLSAATPHGINDILSRPSMPVASGAALPSASPSGSSSSSSSSASASSASAAAAAAAAAAAAASSPAGLLAGLPRFSSLSPPPPPPGLYFSPSAAAVAAVGRYPKPLAELPGRTPIFWPGVMQSPPWRDARLACTPHQGSILLDKDGKRKHTRPTFSGQQIFALEKTFEQTKYLAGPERARLAYSLGMTESQVKVWFQNRRTKWRKKHAAEMATAKKKQDSETERLKGASENEEEDDDYNKPLDPNSDDEKITQLLKKHKSSSGGGGGLLLHASEPESSS

SEQ ID NO: 34 - protein, 802 aa, Homo sapiens
MYRSTKGASKARRDQINAEIRNLKELLPLAEADKVRLSYLHIMSLACIYTRKGVFFAGGTPLAGPTGLLSAQELEDIVAALPGFLLVFTAEGKLLYLSESVSEHLGHSMVDLVAQGDSIYDIIDPADHLTVRQQLTLPSALDTDRLFRCRFNTSKSLRRQSAGNKLVLIRGRFHAHPPGAYWAGNPVFTAFCAPLEPRPRPGPGPGPGPASLFLAMFQSRHAKDLALLDISESVLIYLGFERSELLCKSWYGLLHPEDLAHASAQHYRLLAESGDIQAEMVVRLQAKTGGWAWIYCLLYSEGPEGPITANNYPISDMEAWSLRQQLNSEDTQAAYVLGTPTMLPSFPENILSQEECSSTNPLFTAALGAPRSTSFPSAPELSVVSASEELPRPSKELDFSYLTFPSGPEPSLQAELSKDLVCTPPYTPHQPGGCAFLFSLHEPFQTHLPTPSSTLQEQLTPSTATFSDQLTPSSATFPDPLTSPLQGQLTETSVRSYEDQLTPCTSTFPDQLLPSTATFPEPLGSPAHEQLTPPSTAFQAHLDSPSQTFPEQLSPNPTKTYFAQEGCSFLYEKLPPSPSSPGNGDCTLLALAQLRGPLSVDVPLVPEGLLTPEASPVKQSFFHYSEKEQNEIDRLIQQISQLAQGMDRPFSAEAGTGGLEPLGGLEPLDSNLSLSGAGPPVLSLDLKPWKCQELDFLADPDNMFLEETPVEDIFMDLSTPDPSEEWGSGDPEAEGPGGAPSPCNNLSPEDHSFLEDLATYETAFETGVSAFPYDGFTDELHQLQSQVQDSFHEDGSGGEPTF

SEQ ID NO: 35 - protein, 241 aa, Homo sapiens
MFYSGLLTEGGRKETDMREAASLRQQRRMKQAVQFIHKDSADLLPLDGLKKLGSSKDMQPHNILQRRLMETNLSKLRSGPRVPWASKTNKLNQAKSEGLKKSEEDDMILVSCQCAGKDVKALVDTGCLYNLISLACVDRLGLKEHVKSHKHEGEKLSLPRHLKVVGQIEHLVITLGSLRLDCPAAVVDDNEKNLSLGLQTLRSLKCIINLDKHRLIMGKTDKEEIPFVETVSLNEDNTSEA

SEQ ID NO: 36 - protein, 360 aa, Homo sapiens
MAGHLASDFAFSPPPGGGGDGPGGPEPGWVDPRTWLSFQGPPGGPGIGPGVGPGSEVWGIPPCPPPYEFCGGMAYCGPQVGVGLVPQGGLETSQPEGEAGVGVESNSDGASPEPCTVTPGAVKLEKEKLEQNPEESQDIKALQKELEQFAKLLKQKRITLGYTQADVGLTLGVLFGKVFSQTTICRFEALQLSFKNMCKLRPLLQKWVEEADNNENLQEICKAETLVQARKRKRTSIENRVRGNLENLFLQCPKPTLQQISHIAQQLGLEKDVVRVWFCNRRQKGKRSSSDYAQREDFEAAGSPFSGGPVSFPLAPGPHFGTPGYGSPHFTALYSSVPFPEGEAFPPVSVTTLGSPMHSN

SEQ ID NO: 37 - protein, 323 aa, Homo sapiens
MDSDASLVSSRPSSPEPDDLFLPARSKGSSGSAFTGGTVSSSTPSDCPPELSAELRGAMGSAGAHPGDKLGGSGFKSSSSSTSSSTSSAAASSTKKDKKQMTEPELQQLRLKINSRERKRMHDLNIAMDGLREVMPYAHGPSVRKLSKIATLLLARNYILMLTNSLEEMKRLVSEIYGGHHAGFHPSACGGLAHSAPLPAATAHPAAAAHAAHHPAVHHPILPPAAAAAAAAAAAAAVSSASLPGSGLPSVGSIRPPHGLLKSPSAAAAAPLGGGGGGSGASGGFQHWGGMPCPCSMCQVPPPHHHVSAMGAGSLPRLTSDAK

SEQ ID NO: 38 - protein, 422 aa, Homo sapiens [sequence omitted]

SEQ ID NO: 39 - protein, 520 aa, Homo sapiens
MAALPGTVPRMMRPAPGQNYPRTGFPLEVSTPLGQGRVNQLGGVFINGRPLPNHIRHKIVEMAHHGIRPCVISRQLRVSHGCVSKILCRYQETGSIRPGAIGGSKPRQVATPDVEKKIEEYKRENPGMFSWEIRDRLLKDGHCDRSTVPSGLVSSISRVLRIKFGKKEEEDEADKKEDDGEKKAKHSIDGILGDKGNRLDEGSDVESEPDLPLKRKQRRSRTTFTAEQLEELEKAFERTHYPDIYTREELAQRTKLTEARVQVWFSNRRARWRKQAGANQLAAFNHLLPGGFPPTGMPTLPPYQLPDSTYPTTTISQDGGSTVHRPQPLPPSTMHQGGLAAAAAAADTSSAYGARHSFSSYSDSFMNPAAPSNHMNPVSNGLSPQVMSILGNPSAVPPQPQADFSISPLHGGLDSATSISASCSQRADSIKPGDSLPTSQAYCPPTYSTTGYSVDPVAGYQYGQYGQSECLVPWASPVPIPSPTPRASCLFMESYKVVSGWGMSISQMEKLKSSQMEQFT

SEQ ID NO: 40 - protein, 249 aa, Homo sapiens
MNGEEQYYAATQLYKDPCAFQRGPAPEFSASPPACLYMGRQPPPPPPHPFPGALGALEQGSPPDISPYEVPPLADDPAVAHLHHHLPAQLALPHPPAGPFPEGAEPGVLEEPNRVQLPFPWMKSTKAHAWKGQWAGGAYAAEPEENKRTRTAYTRAQLLELEKEFLFNKYISRPRRVELAVMLNLTERHIKIWFQNRRMKWKKEEDKKRGGGTAVGGGGVAEPEQDCAVTSGEELLALPPPPPPGGAVP

SEQ ID NO: 41 - protein, 689 aa, Homo sapiens
MEDTGIQRGIWDGDAKAVQQCLTDIFTSVYTTCDIPENAIFGPCVLSHTSLYDSIAFIALKSTDKRTVPYIFRVDTSAANGSSEGLMWLRLVQSARDKEEQNLEAYIKNGQLFYRSLRRIAKDEELLVWYGKELTELLLLCPSRSHNKMNGSSPYTCLECSQRFQFEFPYVAHLRFRCPKRLHSADISPQDEQGGGVGTKDHGGGGGGGKDQQQQQQEAPLGPGPKFCKAGPLHHYPSPSPESSNPSAAAGGSSAKPSTDFHNLARELENSRGGSSCSPAQSLSSGSGSGGGGGHQEAELSPDGIATGGGKGKRKFPEEAAEGGGGAGLVGGRGRFVERPLPASKEDLVCTPQQYRASGSYFGLEENGRLFAPPSPETGEAKRSAFVEVKKAARAASLQEEGTADGAGVASEDQDAGGGGGSSTPAAASPVGAEKLLAPRPGGPLPSRLEGGSPARGSAFTSVPQLGSAGSTSGGGGTGAGAAGGAGGGQGAASDERKSAFSQPARSFSQLSPLVLGQKLGALEPCHPADGVGPTRLYPAAADPLAVKLQGAADLNGGCGSLPSGGGGLPKQSPFLYATAFWPKSSAAAAAAAAAAAAGPLQLQLPSALTLLPPSFTSLCLPAQNWCAKCNASFRMTSDLVYHMRSHHKKEYAMEPLVKRRREEKLKCPICNESFRERHHLSRHMTSHN

SEQ ID NO: 42 - protein, 733 aa, Homo sapiens
MERRSESPCLRDSPDRRSGSPDVKGPPPVKVARLEQNGSPMGARGRPNGAVAKAVGGLMIPVFCVVEQLDGSLEYDNREEHAEFVLVRKDVLFSQLVETALLALGYSHSSAAQAQGIIKLGRWNPLPLSYVTDAPDATVADMLQDVYHVVTLKIQLQSCSKLEDLPAEQWNHATVRNALKELLKEMNQSTLAKECPLSQSMISSIVNSTYYANVSATKCQEFGRWYKKYKKIKVERVERENLSDYCVLGQRPMHLPNMNQLASLGKTNEQSPHSQIHHSTPIRNQVPALQPIMSPGLLSPQLSPQLVRQQIAMAHLINQQIAVSRLLAHQHPQAINQQFLNHPPIPRAVKPEPTNSSVEVSPDIYQQVRDELKRASVSQAVFARVAFNRTQGLLSEILRKEEDPRTASQSLLVNLRAMQNFLNLPEVERDRIYQDERERSMNPNVSMVSSASSSPSSSRTPQAKTSTPTTDLPIKVDGANINITAAIYDEIQQEMKRAKVSQALFAKVAANKSQGWLCELLRWKENPSPENRTLWENLCTIRRFLNLPQHERDVIYEEESRHHHSERMQHVVQLPPEPVQVLHRQQSQPAKESSPPREEAPPPPPPTEDSCAKKPRSRTKISLEALGILQSFIHDVGLYPDQEAIHTLSAQLDLPKHTIIKFFQNQRYHVKHHGKLKEHLGSAVDVAEYKDEELLTESEENDSEEGSEEMYKVEAEEENADKSKAAPAEIDQR

SEQ ID NO: 43 - protein, 355 aa, Homo sapiens
MEELTAFVSKSFDQKVKEKKEAITYREVLESGPLRGAKEPTGCTEAGRDDRSSPAVRAAGGGGGGGGGGGGGGGGGGVGGGGAGGGAGGGRSPVRELDMGAAERSREPGSPRLTEGRRKPTKAEVQATLLLPGEAFRFLVSPELKDRKEDAKGMEDEGQTKIKQRRSRTNFTLEQLNELERLFDETHYPDAFMREELSQRLGLSEARVQVWFQNRRAKCRKQENQLHKGVLIGAASQFEACRVAPYVNVGALRMPFQQDSHCNVTPLSFQVQAQLQLDSAVAHAHHHLHPHLAAHAPYMMFPAPPFGLPLATLAADSASAASVVAAAAAAKTTSKNSSIADLRLKAKKHAAALGL

SEQ ID NO: 44 - protein, 317 aa, Homo sapiens
MYNMMETELKPPGPQQTSGGGGGNSTAAAAGGNQKNSPDRVKRPMNAFMVWSRGQRRKMAQENPKMHNSEISKRLGAEWKLLSETEKRPFIDEAKRLRALHMKEHPDYKYRPRRKTKTLMKKDKYTLPGGLLAPGGNSMASGVGVGAGLGAGVNQRMDSYAHMNGWSNGSYSMMQDQLGYPQHPGLNAHGAAQMQPMHRYDVSALQYNSMTSSQTYMNGSPTYSMSYSQQGTPGMALGSMGSVVKSEASSSPPVVTSSSHSRAPCQAGDLRDMISMYLPGAEVPEPAAPSRLHMSQHYQSGPVPGTAINGTLPLSHM

SEQ ID NO: 45 - protein, 509 aa, Homo sapiens
MNLLDPFMKMTDEQEKGLSGAPSPTMSEDSAGSPCPSGSGSDTENTRPQENTFPKGEPDLKKESEEDKFPVCIREAVSQVLKGYDWTLVPMPVRVNGSSKNKPHVKRPMNAFMVWAQAARRKLADQYPHLHNAELSKTLGKLWRLLNESEKRPFVEEAERLRVQHKKDHPDYKYQPRRRKSVKNGQAEAEEATEQTHISPNAIFKALQADSPHSSSGMSEVHSPGEHSGQSQGPPTPPTTPKTDVQPGKADLKREGRPLPEGGRQPPIDFRDVDIGELSSDVISNIETFDVNEFDQYLPPNGHPGVPATHGQVTYTGSYGISSTAATPASAGHVWMSKQQAPPPPPQQPPQAPPAPQAPPQPQAAPPQQPAAPPQQPQAHTLTTLSSEPGQSQRTHIKTEQLSPSHYSEQQQHSPQQIAYSPFNLPHYSPSYPPITRSQYDYTDHQNSSSYYSHAAGQGTGLYSTFTYMNPAQRPMYTPIADTSGVPSIPQTHSPQHWEQPVYTQLTRP

SEQ ID NO: 46 - protein, 682 aa, Homo sapiens
MQLEHCLSPSIMLSKKFLNVSSSYPHSGGSELVLHDHPIISTTDNLERSSPLKKITRGMTNQSDTDNFPDSKDSPGDVQRSKLSPVLDGVSELRHSFDGSAADRYLLSQSSQPQSAATAPSAMFPYPGQHGPAHPAFSIGSPSRYMAHHPVITNGAYNSLLSNSSPQGYPTAGYPYPQQYGHSYQGAPFYQFSSTQPGLVPGKAQVYLCNRPLWLKFHRHQTEMIITKQGRRMFPFLSFNISGLDPTAHYNIFVDVILADPNHWRFQGGKWVPCGKADTNVQGNRVYMHPDSPNTGAHWMRQEISFGKLKLTNNKGASNNNGQMVVLQSLHKYQPRLHVVEVNEDGTEDTSQPGRVQTFTFPETQFIAVTAYQNTDITQLKIDHNPFAKGFRDNYDTIYTGCDMDRLTPSPNDSPRSQIVPGARYAMAGSFLQDQFVSNYAKARFHPGAGAGPGPGTDRSVPHTNGLLSPQQAEDPGAPSPQRWFVTPANNRLDFAASAYDTATDFAGNAATLLSYAAAGVKALPLQAAGCTGRPLGYYADPSGWGARSPPQYCGTKSGSVLPCWPNSAAAAARMAGANPYLGEEAEGLAAERSPLPPGAAEDAKPKDLSDSSWIETPSSIKSIDSSDSGIYEQAKRRRISPADTPVSESSSPLKSEVLAQRDCEKNCAKDISGYYGFYSHS

SEQ ID NO: 47 - protein, 513 aa, Homo sapiens
MADADEALAGAHLWSLTQKTCLRFEPRARSGPPASPPGRPRSRLHPAGMEGIKVFLHERELWLKFHEVTEMIITKAGRRMFPSYKVKVTGINPKTKYILLMDIVPADDHRYKFADNKWCVTGKAEPAMAGRLYVHPDSPATGAHWMRQLVSFQKLKLTNNHLDPFGHIILNSMHKYQPRLHIVKADENNGFGSKNTAFCTHVFPETAFIAVTSYQNHKITQLKIENNPFAKGFRGSDDMELHRMSRMQSKEYPVVPRSTVRQKVASNHSPFSSESRALSTSSNLGSQYQCENGVSGPSQDLLPPPNPYPLPQEHSQIYHCTKRKEEECSTTDHPYKKPYMETSPSEEDSFYRSSYPQQQGLGASYRTESAQRQACMYASSAPPSEPVPSLEDISCNTWPSMPSYSSCTVTTVQPWTGYPTSTSPLTSPRGPWSLGWLAWQPWLPTAGRGNVPSTRPPVAHQPVVSSVGPQTGLQSPGTLQPPEFLYSHGVQGLYPLISTTLCTELAWCRVERQ

SEQ ID NO: 48 - protein, 607 aa, Homo sapiens
MAEKRRGSPCSMLSLKAHAFSVEALIGAEKQQQLQKKRRKLGAEEAAGAVDDGGCSRGGGAGEKGSSEGDEGAALPPPAGATSGPARSGADLERGAAGGCEDGFQQGASPLASPGGSPKGSPARSLARPGTPLPSPQAPRVDLQGAELWKRFHEIGTEMIITKAGRRMFPAMRVKISGLDPHQQYYIAMDIVPVDNKRYRYVYHSSKWMVAGNADSPVPPRVYIHPDSPASGETWMRQVISFDKLKLTNNELDDQGHIILHSMHKYQPRVHVIRKDCGDDLSPIKPVPSGEGVKAFSFPETVFTTVTAYQNQQITRLKIDRNPFAKGFRDSGRNRMGLEALVESYAFWRPSLRTLTFEDIPGIPKQGNASSSTLLQGTGNGVPATHPHLLSGSSCSSPAFHLGPNTSQLCSLAPADYSACARSGLTLNRYSTSLAETYNRLTNQAGETFAPPRTPSYVGVSSSTSVNMSMGGTDGDTFSCPQTSLSMQISGMSPQLQYIMPSPSSNAFATNQTHQGSYNTFRLHSPCALYGYNFSTSPKLAASPEKIVSSQGSFLGSSPSGTMTDRQMLPPVEGVHLLSSGGQQSFFDSRTLGSLTLSSSQVSAHMV

SEQ ID NO: 49 - protein, 447 aa, Homo sapiens
MLLDAGPQYPAIGVTTFGASRHHSAGDVAERDVGLGINPFADGMGAFKLNPSSHELASAGQTAFTSQAPGYAAAAALGHHHHPGHVGSYSSAAFNSTRDFLFRNRGFGDAAAAASAQHSLFAASAGGFGGPHGHTDAAGHLLFPGLHEQAAGHASPNVVNGQMRLGFSGDMYPRPEQYGQVTSPRSEHYAAPQLHGYGPMNVNMAAHHGAGAFFRYMRQPIKQELICKWIEPEQLANPKKSCNKTFSTMHELVTHVTVEHVGGPEQSNHICFWEECPREGKPFKAKYKLVNHIRVHTGEKPFPCPFPGCGKVFARSENLKIHKRTHTGEKPFKCEFEGCDRRFANSSDRKKHMHVHTSDKPYLCKMCDKSYTHPSSLRKHMKVHESSSQGSQPSPAASSGYESSTPPTIVSPSTDNPTTSSLSPSSSAVHHTAGHSALSSNFNEWYV

SEQ ID NO: 50 - protein, 236 aa, Artificial Sequence
  synthetic
MESSAKMESGGAGQQPQPQPQQPFLPPAACFFATAAAAAAAAAAAAAQSAQQQQQQQQQQQQAPQLRPAADGQPSGGGHKSAPKQVKRQRSSSPELMRCKRRLNFSGFGYSLPQQQPAAVARRNERERNRVKLVNLGFATLREHVPNGAANKKMSKVETLRSAVEYIRAAQQLLDEHDAVSAAFQAGVLSPTISPNYSNDLNSMAGSPVSSYSSDEGSYDPLSPEEQELLDFTNWF

SEQ ID NO: 51 - protein, 483 aa, Artificial Sequence
  synthetic
MAADEVAGGARKATKSKLFEFLVHGVRPGMPSGARMPHQGAPMGPPGSPYMGSPAVRPGLAPAGMEPARKRAAPPPGQSQAQSQGQPVPTAPARSRSAKRRKMADKILPQRIRELVPESQAYMDLLAFERKLDQTIMRKRVDIQEALKRPMKQKRKLRLYISNTFNPAKPDAEDSDGSIASWELRVEGKLLDDPSKQKRKFSSFFKSLVIELDKDLYGPDNHLVEWHRTPTTQETDGFQVKRPGDLSVRCTLLLMLDYQPPQFKLDPRAARAAGLHTQSRSAIVQALWQYVKTNRLQDSHDKEYINGDKYFQQIFDCPRLKFSEIPQRLTALLLPPDPIVINHVISVDPSDQKKTACYDIDVEVEEPLKGQMSSFLLSTANQQEISALDSKIHETIESINQLKIQRDFMLSFSRDPKGYVQDLLRSQSRDLKVMTDVAGNPEEERRAEFYHQPWSQEAVSRYFYCKIQQRRQELEQSLVVRNT

SEQ ID NO: 52 - protein, 443 aa, Artificial Sequence
  synthetic
MATAASNHYSLLTSSASIVHAEPPGGMQQGAGGYREAQSLVQGDYGALQSNGHPLSHAHQWITALSHGGGGGGGGGGGGGGGGGGGGGDGSPWSTSPLGQPDIKPSVVVQQGGRGDELHGPGALQQQHQQQQQQQQQQQQQQQQQQQQQRPPHLVHHAANHHPGPGAWRSAAAAAHLPPSMGASNGGLLYSQPSFTVNGMLGAGGQPAGLHHHGLRDAHDEPHHADHHPHPHSHPHQQPPPPPPPQGPPGHPGAHHDPHSDEDTPTSDDLEQFAKQFKQRRIKLGFTQADVGLALGTLYGNVFSQTTICRFEALQLSFKNMCKLKPLLNKWLEEADSSSGSPTSIDKIAAQGRKRKKRTSIEVSVKGALESHFLKCPKPSAQEITSAADSAQLEKEVVRVWFCNRRQKEKRMTPPGGTLPGAEDVYGGSRDTPPHHGVQTPVQ

SEQ ID NO: 53 - protein, 361 aa, Homo sapiens
MATAASNPYSILSSTSLVHADSAGMQQGSPFRNPQKLLQSDYLQGVPSNGHPLGHHWVTSLSDGGPWSSTLATSPLDQQDVKPGREDLQLGAIIHHRSPHVAHHSPHTNHPNAWGASPAPNPSITSSGQPLNVYSQPGFTVSGMLEHGGLTPPPAAASAQSLHPVLREPPDHGELGSHHCQDHSDEETPTSDELEQFAKQFKQRRIKLGFTQADVGLALGTLYGNVFSQTTICRFEALQLSFKNMCKLKPLLNKWLEEADSSTGSPTSIDKIAAQGRKRKKRTSIEVSVKGVLETHFLKCPKPAAQEISSAADSAQLEKEVVRVWFCNRRQKEKRMTPPGDQQPHEVYSHTVKTDTSCHDL

SEQ ID NO: 54 - protein, 1954 aa, Artificial Sequence; identical to SEQ ID NO: 5
  Synthetic

SEQ ID NO: 55 - protein, 454 aa, Artificial Sequence
  synthetic
MDFFRVVENQQPPATMPLNVSFTNRNYDLDYDSVQPYFYCDEEENFYQQQQQSELQPPAPSEDIWKKFELLPTPPLSPSRRSGLCSPSYVAVTPFSLRGDNDGGGGSFSTADQLEMVTELLGGDMVNQSFICDPDDETFIKNIIIQDCMWSGFSAAAKLVSEKLASYQAARKDSGSPNPARGHSVCSTSSLYLQDLSAAASECIDPSVVFPYPLNDSSSPKSCASQDSSAFSPSSDSLLSSTESSPQGSPEPLVLHEETPPTTSSDSEEEQEDEEEIDVVSVEKRQAPGKRSESGSPSAGGHSKPPHSPLVLKRCHVSTHQHNYAAPPSTRKDYPAAKRVKLDSVRVLRQISNNRKCTSPRSSDTEENVKRRTHNVLERQRRNELKRSFFALRDQIPELENNEKAPKVVILKKATAYILSVQAEEQKLISEEDLLRKRREQAKHKAEQLRNSCA

SEQ ID NO: 56 - protein, 255 aa, Artificial Sequence
  Synthetic
MTMTTMPESLNSPVSGKAVFMEFGPPNQQMSPSPMSHGHYSMHCLHSAGHSQPDGAYSSASSFSRPLGYPYVNSVSSHASSPYISSVQSYPGSASLAQSRLEDPGADSEKSTVVEGGEVRFNGKGKKIRKPRTIYSSLQLQALNRRFQQTQYLALPERAEAAASAGLTQTQVKIWFQNKRSKFKKLMKQGGAALEGSALANGRALSAGSPPVPPGWNPNSSSGKGSGGNAGSYIPSYTSWYPSAHQEAMQQPQLM

SEQ ID NO: 57 - protein, 328 aa, Artificial Sequence
  Synthetic
MTGVFDSLVADMHSTQIAASSTYHQHQQPPSGGGAGPGGNSSSSSSLHKPQESPTLPVSTATDSSYYTNQQHPAGGGGGGGSPYAHMGSYQYQASGLNNVPYSAKSSYDLGYTAAYTSYAPYGTSSSPANNEPEKEDLEPEIRIVNGKPKKVRKPRTIYSSFQLAALQRRFQKTQYLALPERAEAAASAGLTQTQVKIWFQNRRSKFKKMWKSGEIPSEQHPGASASPPCASPPVSAPASWDFGVPQRMAGGGGPGSGGSGAGSSGSSPSSAASAFLGNYPWYHQTSGSASHLQATAPLLHPTQTPQPHHHHHHHGGGGAPVSAGTIF

SEQ ID NO: 58 - protein, 677 aa, Artificial Sequence
  Synthetic
MMQESGTETKSNGSAIQNGSGGSNHLLECGGLREGRSNGETPAVDIGAADLAHAQQQQQQAAQVARQALLQQQQQQQVSGLKSPKRNDKQPALQVPVSVAMMTPQVITPQQMQQILQQQVLSPQQLQVLLQQQQALMLQQQQLQEFYKKQQEQLQLQLLQQQHAGKQPKEQQQVATQQLAFQQQLLQMQQLQQQHLLSLQRQGLLTIQPGQPALPLQPLAQGMIPTELQQLWKEVTSAHTAEETTGNNHSSLDLTTTCVSSSAPSKTSLIMNPHASTNGQLSVHTPKRESLSHEEHPHSHPLYGHGVCKWPGCEAVCEDFQSFLKHLNSEHALDDRSTAQCRVQMQVVQQLELQLAKDKERLQAMMTHLHVKSTEPKAAPQPLNLVSSVTLSKSASEASPQSLPHTPTTPTAPLTPVTQGPSVITTTSMHTVGPIRRRYSDKYNVPISSADIAQNQEFYKNAEVRPPFTYASLIRQAILESPEKQLTLNEIYNWFTRMFAYFRRNAATWKNAVRHNLSLHKCFVRVENVKGAVWTVDEVEFQKRRPQKISGNPSLIKNMQSSHAYCTPLNAALQASMAENSIPLYTTASMGNPTLGNLASAIREELNGAMEHTNSNESDSSPGRSPMQAVHPVHVKEEPLDPEEAEGPLSLVTTANHSPDFDHDRDYEDEPVNEDME

SEQ ID NO: 59 - protein, 714 aa, Artificial Sequence
  Synthetic
MMQESATETISNSSMNQNGMSTLSSQLDAGSRDGRSSGDTSSEASTAEALHLQQQQAAQAARQALLQQQTSGLKSPKSSDKQRPLQVPVSVAMMTPQVITPQQMQQILQQQVLSPQQLQALLQQQQAVMLQQQQLQEFYKKQQEQLHLQLLQQQQQQQQQQQQQQQQQQQQQQQQQQQQQQQQQQQQQQQQHPGKQAKEQQQQQQQQQLAAQQLVFQQQLLHMQQLQQQQHLLSLQRQGLISIPPGQAALPVQSLPQAGLSPAEIQQLWKEVTGVHSMEDNGIKHGGLDLTTNNSSSTTSSNTSKASPPITHHSIVNGQSSVLSARRDSSSHEETGASHTLYGHGVCKWPGCESICEDFGQFLKHLNNEHALDDRSTAQCRVQMQVVQQLEIQLSKERERLQAMMTHLHMRPSEPKPSPKPLNLVSSVTMSKNMLETSPQSLPQTPTTPTAPVTPITQGPSVITPASVPNVGAIRRRHSDKYNIPMSSEIAPNYEFYKNADVRPPFTYATLIRQAIMESSDRQLTLNEIYSWFTRTFAYFRRNAATWKNAVRHNLSLHKCFVRVENVKGAVWTVDEVEYQKRRSQKITGSPTLVKNIPTSLGYGAALNASLQAALAESSLPLLSNPGLINNASSGLLQAVHEDLNGSLDHIDSNGNSSPGCSPQPHIHSIHVKEEPVIAEDEDCPMSLVTTANHSPELEDDREIEEEPLSEDLE

SEQ ID NO: 60 - protein, 454 aa, Artificial Sequence
  Synthetic
MPNPRPGKPSAPSLALGPSPGASPSWRAAPKASDLLGARGPGGTFQGRDLRGGAHASSSSLNPMPPSQLQLPTLPLVMVAPSGARLGPLPHLQALLQDRPHFMHQLSTVDAHARTPVLQVHPLESPAMISLTPPTTATGVFSLKARPGLPPGINVASLEWVSREPALLCTFPNPSAPRKDRSVDRAGKDPRPPIPSPDTLCPPSTLSAVPQSSYPLLANGVCKWPGCEKVFEEPEDFLKHCQADHLLDEKGRAQCLLQREMVQSAEQQAVAEKEKLSAMQAHLAGKMALTKASSVASSDKGSCCIVAAGSQGPVVPAWSGPREAPDSLFAVRRHLWGSHGNSTFPEFLHNMDYFKFHNMRPPFTYATLIRWAILEAPEKQRTLNEIYHWFTRMFAFFRNHPATWKNAIRHNLSLHKCFVRVESEKGAVWTVDELEFRKKRSQRPSRCSNPTPGP

SEQ ID NO: 61 - protein, 443 aa, Artificial Sequence
  Synthetic
MYQSLAMAANHGPPPGAYEAGGPGAFMHGAGAASSPVYVPTPRAPSSAAGLSYLQGGGAGSASGGASGGSSGGAASGAGPGTQQGSPGWSQAGADGAAYTPPPVSPRFSFPGTTGSLAAAAAAAAAREAAAYSSGGGAAGAGLAGREQYGRAGFAGSYSSPYPAYMADVGASWAAAAAASAGPFDSPVLHSLPGRANPAARHPNLVDMFDDFSEGRECVNCGAMSTPLWRRDGTGHYLCNACGLYHKMNGINRPLIKPQRRLSASRRVGLSCANCQTTTTTLWRRNAEGEPVCNACGLYMKLHGVPRPLAMRKEGIQTRKRKPKNLNKSKTPAAPSGSESLPPASGASSNSSNATTSSSEEMRPIKTEPGLSSHYGHSSSVSQTFSVSAMSGHGPSIHPVLSALKLSPQGYASPVSQSPQTSSKQDSWNSLVLADSHGDIITA

SEQ ID NO: 62 - protein, 215 aa, Artificial Sequence
  Synthetic
MNLVGSYAHHHHHHHPHPAHPMLHEPFLFGPASRCHQERPYFQSWLLSPADAAPDFPAGGPPPAAAAAATAYGPDARPGQSPGRLEALGGRLGRRKGSGPKKERRRTESINSAFAELRECIPNVPADTKASKAKTARLATSYIAYLMDVLAKDAQSGDPEAFKAELKKADGGRESKRKRELQQHEGFPPALGPVEKRIKGRTGWPQQVWALELNQ

SEQ ID NO: 63 - protein, 280 aa, Artificial Sequence
  Synthetic
MPADIMEKNSSSPVAATPASVNTTPDKPKTASEHRKSSKPIMEKRRRARINESASQAKTAILDALKKDSSRHSKLEKADILEMTVKHLRNLQRAQMTAALSTDPSVLGKYRAGFSECMNEVTRFLSTCEGVNTEVRTRLLGHLANCMTQINAMTYPGQPHPALQAPPPPPPGPGGPQHAPFAPPPPLVPIPGGAAPPPGGAPCKLGSQAGEAAKVFGGFQVVPAPDGQFAFLIPNGAFAHSGPVIPVYTSNSGTSVGPNAVSPSSGPSLTADSMWRPWRN

SEQ ID NO: 64 - protein, 166 aa, Artificial Sequence
  Synthetic
MAPSTVAVELLSPKEKNRLRKPVVEKMRRDRINSSAEQAKALLEQEFARHQPNSKLEKADILEMAVSYLKHSKAFVAAAGPKSLHQDYSEGYSWCLQEAVQFLTLHAASDTQMKLLYHFQRPPAAPAAPAKEPKAPGAAPPPALSAKATAAAAAAHQPACGLWRPW

SEQ ID NO: 65 - protein, 349 aa, Artificial Sequence
  Synthetic
MGDMGDPPKKKRLISLCVGCGNQIHDQYILRVSPDLEWHAACLKCAECNQYLDESCTCFVRDGKTYCKRDYIRLYGIKCAKCSIGFSKNDFVMRARSKVYHIECFRCVACSRQLIPGDEFALREDGLFCRADHDVVERASLGAGDPLSPLHPARPLQMAAEPISARQPALRPHVHKQPEKTTRVRTVLNEKQLHTLRTCYAANPRPDALMKEQLVEMTGLSPRVIRVWFQNKRCKDKKRSIMMKQLQQQQPNDKTNIQGMTGTPMVAASPERHDGGLQANPVEVQSYQPPWKALSDAALQSDIDQPAFQQLVNFSEGGPGSNSTGSEVASMSSQLPDTPNSMVASPIEA

SEQ ID NO: 66 - protein, 406 aa, Artificial Sequence
  Synthetic
MLFHSLSGPEVHGVIDEMDRRAKSEAPAISSAIDRGDTETTMPSISSDRAALCAGCGGKISDRYYLLAVDKQWHARCAKCCECKLNLESELTCFSKDGSIYCKEDYYRRFSVQRCARCHLGISASEMVMRARDLVYHLNCFTCTTCNKMLTTGDHFGMKDSLVYCRLHFEALLQGEYPAHFNHADVAAAAAAAAAAKSAGLGAAGANPLGLPYYNGVGTVQKGRPRKRKSPGPGADLAAYNAALSCNENDAEHLDRDQPYPSSQKTKRMRTSFKHHQLRTMKSYFAINHNPDAKDLKQLAQKTGLTKRVLQVWFQNARAKFRRNLLRQENTGVDKSTDAALQTGTPSGPASELSNASLSPSSTPTTLTDLTSPTLPTVTSVLTSVPGNLEGHEPHSPSQTTLTNLF

SEQ ID NO: 67 - protein, 479 aa, Artificial Sequence
  Synthetic
MRQPPGESDMAVSDALLPSFSTFASGPAGREKTLRQAGAPNNRWREELSHMKRLPPVLPGRPYDLAAATVATDLESGGAGAACGGSNLAPLPRRETEEFNDAADLDAILSNSLTHPPESVAATVSSSASASSSSSPSSSGPASAPSTCSFTYPIRAGNDPGVAPGGTGGGLLYGRESAPPPTAPFNLADINDVSPSGGFVAELLRPELDPVYIPPQQPQPPGGGLMGKFVLKASLSAPGSEYGSPSVISVSKGSPDGSHPVVVAPYNGGPPRTCPKIKQEAVSSCTHLGAGPPLSNGHRPAAHDFPLGRQLPSRTTPTLGLEEVLSSRDCHPALPLPPGFHPHPGPNYPSFLPDQMQPQVPPLHYQELMPPGSCMPEEPKPKRGRRSWPRKRTATHTCDYAGCGKTYTKSSHLKAHLRTHTGEKPYHCDWDGCGWKFARSDELTRHYRKHTGHRPFQCQKCDRAFSRSDHLALHMKRHF

SEQ ID NO: 68 - protein, 353 aa, Artificial Sequence
  Synthetic
MAAELAMGAELPSSPLAIEYVNDFDLMKFEVKKEPPEAERFCHRLPPGSLSSTPLSTPCSSVPSSPSFCAPSPGTGGGGGAGGGGGSSQAGGAPGPPSGGPGAVGGTSGKPALEDLYWMSGYQHHLNPEALNLTPEDAVEALIGSGHHGAHHGAHHPAAAAAYEAFRGPGFAGGGGADDMGAGHHHGAHHAAHHHHAAHHHHHHHHHHGGAGHGGGAGHHVRLEERFSDDQLVSMSVRELNRQLRGFSKEEVIRLKQKRRTLKNRGYAQSCRFKRVQQRHILESEKCQLQSQAEQAKLEVGRLAKERDLYKEKYEKLAGRGGPGSAGGAGFPREPSPPQAGPGGAKGTADFFL

SEQ ID NO: 69 - protein, 473 aa, Artificial Sequence
  Synthetic
MGRKKIQITRIMDERNRQVTFTKRKFGLMKKAYEASVACDCEAALIIFNSTNKLFQYASTDMDKVLLKYTEYNEPHESRTNSDIVETLRKKGLNGCDSPDPDADDSVGHSPESEDKYRKINEDIDLMISRQRLCAVPPPNFEMPVSIPVSSHNSLVYSNPVSSLGNPNLLPLAHPSLQRNSMSPGVTHRPPSAGNTGGLMGGDLTSGAGTSAGNGYGNPRNSPGLLVSPGNLNKNMQAKSPPPMNLGMNNRKPDLRVLIPPGSKNTMPSVSEDVDLLLNQRINNSQSAQSLATPVVSVATPTLPGQGMGGYPSAISTTYGTEYSLSSADLSSLSGFNTASALHLGSVTGWQQQHLHNMPPSALSQLGACTSTHLSQSSNLSLPSTQSLNIKSEPVSPPRDRTTTPSRYPQHTRHEAGRSPVDSLSSCSSSYDGSDREDHRNEFHSPIGLTRPSPDERESPSVKRMRLSEGWAT

SEQ ID NO: 70 - protein, 268 aa, Artificial Sequence
  Synthetic
MAQPLCPPLSESWMLSAAWGPTRRPPPSDKDCGRSLVSSPDSWGSTPADSPVASPARPGTLRDPRAPSVGRRGARSSRLGSGQRQSASEREKLRMRTLARALHELRRFLPPSVAPAGQSLTKAETARLAIRYAGHASAVLGLSEESLQRRCRQRGDAGSPRGCPLCPDDCPAQMQTRTQAEGQGQGRGLGLVSAVRAGASWGSPPACPGARAAPEPRDPPALFAEAACPEGQAMEPSPPSPLLPGDVLALLETWMPLSPLEWLPEEPK

SEQ ID NO: 71 - protein, 320 aa, Artificial Sequence
  Synthetic
MEAASPPARDVDLTAPDGSLCSFATTDDFYDDPCFDSPDLRFFEDLDPRLMHVGALLKPEEHSHFPAAVHPAPGAREDEHVRAPSGHHQAGRCLLWACKACKRKTTNADRRKAATMRERRRLSKVNEAFETLKRCTSSNPNQRLPKVEILRNAIRYIEGLQALLRDQDAAPPGAAAAFYAPGPLPPGRGGEHYSGDSDASSPRSNCSDGMMDYSGPPSGARRRNCYEGAYYNEAPSEPRPGKSAAVSSLDCLSSIVERISTESPAAPALLLADVPSESPPRRQEAAAPSEGESSGDPTQSPDAAPQCPAGANPNPIYQVL

SEQ ID NO: 72 - protein, 1184 aa, Artificial Sequence
  Synthetic
MEVDTEEKRHRTRSKGVRVPVEPAIQELFSCPTPGCDGSGHVSGKYARHRSVYGCPLAKKRKTQDKQPQEPAPKRKPFAVKADSSSVDECDDSDGTEDMDEKEEDEGEEYSEDNDEPGDEDEEDEEGDREEEEEIEEEDEDDDEDGEDVEDEEEEEEEEEEEEEEEENEDHQMNCHNTRIMQDTEKDDNNNDEYDNYDELVAKSLLNLGKIAEDAAYRARTESEMNSNTSNSLEDDSDKNENLGRKSEASADLDSDVVRETVDSLKLLAQGHGVVLSENMNDRNYADSMSQQDSRNMNYVMLGKPMNNGLMEKMVEESDEEVCLSSLECLRNQCFDLARKLSETNPQERNPQQNMNIRQHVRPEEDFPGRTPDRNYSDMLNLMRLEEQLSPRSRVFASCAKEDGCHERDDDTTSVNSDRSEEVFDMTKGNLTLLEKAIALETERAKAMREKMAMEAGRRDNMRSYEDQSPRQLPGEDRKPKSSDSHVKKPYYDPSRTEKKESKCPTPGCDGTGHVTGLYPHHRSLSGCPHKDRVPPEILAMHESVLKCPTPGCTGRGHVNSNRNSHRSLSGCPIAAAEKLAKAQEKHQSCDVSKSSQASDRVLRPMCFVKQLEIPQYGYRNNVPTTTPRSNLAKELEKYSKTSFEYNSYDNHTYGKRAIAPKVQTRDISPKGYDDAKRYCKDPSPSSSSTSSYAPSSSSNLSCGGGSSASSTCSKSSFDYTHDMEAAHMAATAILNLSTRCREMPQNLSTKPQDLCATRNPDMEVDENGTLDLSMNKQRPRDSCCPILTPLEPMSPQQQAVMNNRCFQLGEGDCWDLPVDYTKMKPRRIDEDESKDITPEDLDPFQEALEERRYPGEVTIPSPKPKYPQCKESKKDLITLSGCPLADKSIRSMLATSSQELKCPTPGCDGSGHITGNYASHRSLSGCPRAKKSGIRIAQSKEDKEDQEPIRCPVPGCDGQGHITGKYASHRSASGCPLAAKRQKDGYLNGSQFSWKSVKTEGMSCPTPGCDGSGHVSGSFLTHRSLSGCPRATSAMKKAKLSGEQMLTIKQRASNGIENDEEIKQLDEEIKELNESNSQMEADMIKLRTQITTMESNLKTIEEENKVIEQQNESLLHELANLSQSLIHSLANIQLPHMDPINEQNFDAYVTTLTEMYTNQDRYQSPENKALLENIKQAVRGIQV

SEQ ID NO: 73 - protein, 305 aa, Artificial Sequence
  Synthetic
MSVDPACPQSLPCFEASDCKESSPMPVICGPEENYPSLQMSSAEMPHTETVSPLPSSMDLLIQDSPDSSTSPKGKQPTSAEKSVAKKEDKVPVKKQKTRTVFSSTQLCVLNDRFQRQKYLSLQQAQEASNILNLSYKQVKTWFQNQRMKSKRWQKNNWPKNSNGVTQKASAPTYPSLYSSYHQGCLVNPTGNLPMWSNQTWNNSTWSNQTQNIQSWSNHSWNTQTWCTQSWNNQAWNSPFYNCGEESLQSCMQFQPNSPASDLEAALEAAGEGLNVIQQTTRYFSTPQTMDLFLNYSMNMQPEDV

SEQ ID NO: 74 - protein, 460 aa, Artificial Sequence
  Synthetic
MAESENRKELSESSQEEAGNQIMVEGLGEHLERGEDAAAGLGDDGKCGEEAAAGLGEEGENGEDTAAGSGEDGKKGGDTDEDSEADRPKGLIGYVLDTDFVESLPVKVKYRVLALKKLQTRAANLESKFLREFHDIERKFAEMYQPLLEKRRQIINAIYEPTEEECEYKSDSEDCDDEEMCHEEMYGNEEGMVHEYVDEDDGYEDYYYDYAVEEEEEEEEEDDIEATGEENKEEEDPKGIPDFWLTVLKNVDTLTPLIKKYDEPILKALTDAKVKLSDPGEPLSFTLEFHFKPNEYFKNELLTKTYVLKSKLAYYDPHPYRGTAIEYSTGCEIDWNEGKNVTLKTIKKKQKHRIWGTIRTVTEDFPKDSFFNFFSPHGITSNGRDGNDDFLLGHNLRTYIIPRSVLFFSGDALESQQEGVVREVNDAIYDKIIYDNWMAAIEEVKACCKNLEALVEDIDR

SEQ ID NO: 75 - protein, 356 aa, Artificial Sequence
  Synthetic
MTKSYSESGLMGEPQPQGPPSWTDECLSSQDEEHEADKKEDDLEAMNAEEDSLRNGGEEEDEDEDLEEEEEEEEEDDDQKPKRRGPKKKKMTKARLERFKLRRMKANARERNRMHGLNAALDNLRKVVPCYSKTQKASKAETLRLAKNYIWALSEILRSGKSPDLVSFVQTLCKGLSQPTTNLVAGCLQLNPRTFLPEQNQDMPPHLPTASASFPVHPYSYQSPGLPSPPYGTMDSSHVFHVKPPPHAYSAALEPFFESPLTDCTSPSFDGPLSPPLSINGNFSFKHEPSAEFEKNYAFTMHYPAATLAGAQSHGSIFSGTAAPRCEIPIDNIMSFDSHSHHERVMSAQLNAIFHD

SEQ ID NO: 76 - protein, 382 aa, Artificial Sequence
  Synthetic
MLTRLFSEPGLLSDVPKFASWGDGEDDEPRSDKGDAPPPPPPAPGPGAPGPARAAKPVPLRGEEGTEATLAEVKEEGELGGEEEEEEEEEEGLDEAEGERPKKRGPKKRKMTKARLERSKLRRQKANARERNRMHDLNAALDNLRKVVPCYSKTQKASKAETLRLAKNYIWALSEILRSGKRPDLVSYVQTLCKGLSQPTTNLVAGCLQLNSRNFLTEQGADGAGRFHGSGGPFAMHPYPYPCSRLAGAQCQAAGGLGGGAAHALRTHGYCAAYETLYAAAGGGGASPDYNSSEYEGPLSPPLCLNGNFSLKQDSSPDHEKSYHYSMHYSALPGSRPTGHGLVFGSSAVRGGVHSENLLSYDMHLHHDRGPMYEELNAFFHN

SEQ ID NO: 77 - protein, 272 aa, Artificial Sequence
  Synthetic
MFVKSETAEAKEEEDVLVLLGSASPALAALTPLSSSADEEEEEEPGASGGARRQRGAEAGQGARGGVAAGAEGCRPARLLGLVHDCKRRPSRARAVSRGAKTAETVQRIKKTRRLKANNRERNRMHNLNAALDALREVLPTFPEDAKLTKIETLRFAHNYIWALTETLRLADHCGGGGGGLPGALFSEAVLLSPGGASAALSSSGDSPSPASTWSCTNSPAPSSSVSSNSTSPYSCTLSPASPAGSDMDYWQPPPPDKHRYAPHLPIARDCI

SEQ ID NO: 78 - protein, 214 aa, Artificial Sequence
  Synthetic
MTPQPSGAPTVQVTRETERSFPRASEDEVTCPTSAPPSPTRTRGNCAEAEEGGCRGAPRKLRARRGGRSRPKSELALSKQRRSRRKKANDRERNRMHNLNSALDALRGVLPTFPDDAKLTKIETLRFAHNYIWAATQTARIADHSLYALEPPAPHCGELGSPGGSPGDWGSLYSPVSQAGSLSPAASLEERPGLLGATFSACLSPGSLAFSDFL

SEQ ID NO: 79 - protein, 135 aa, Artificial Sequence
  Synthetic
MMLSPDQAADSDHPSSAHSDPESLGGTDTKVLGSVSDLEPVEEAEGDGKGGSRAALYPHPQQLSREEKRRRRRATAKYRSAHATRERIRVEAFNLAFAELRKLLPTLPPDKKASKAEILRLAICYISYLNHVLDV

SEQ ID NO: 80 - protein, 273 aa, Artificial Sequence
  Synthetic
MSLTNTKTGFSVKDILDLPDTNDEEGSVAEGPEEENEGPEPAKRAGPLGQGAADAAQSLPLKNPFYDSSDNPYTRWLASTEGLQYSLHGLAAGAPPQDSSSKSPEPSADESPDNDKETPGGGGDAGKKRKRRVLFSKAQTYELERRFRQQRYLSAPEREHLASLIRLTPTQVKIWFQNHRYKMKRARAEKGMEVTPLPSPRRVAVPVLVRDGKPCHALKAQDLAAATFQAGIPFSAYSAQSLQHMQYNAQYSSASTPQYPTAHPLVQAQQWTW

SEQ ID NO: 81 - protein, 324 aa, Artificial Sequence
  Synthetic
MFPSPALTPTPFSVKDILNLEQQQRSLAAAGELSARLEATLAPSSCMLAAFKPEAYAGPEAAAPGLPELRAELGRAPSPAKCASAFPAAPAFYPRAYSDPDPAKDPRAEKKELCALQKAVELEKTEADNAERPRARRRRKPRVLFSQAQVYELERRFKQQRYLSAPERDQAASAAKLTSTQVKIWFQNRRYKCKRQRQDQTLELVGLPPPPPPPARRIAVPVLVRDGKPCLGDSAPYAPAYGVGLNPYGYNAYPAYPGYGGAACSPGYSCTAAYPAGPSPAQPATAAANNNFVNFGVGDLNAVQSPGIPQSNSGVSTLHGIRAW

SEQ ID NO: 82 - protein, 367 aa, Artificial Sequence
  Synthetic
MLAVGAMEGTRQSAFALSSPPAAALHSMAEMKTPLYPAAYPPLPAGPPSSSSSSSSSSSPSPPLGTHNPGGLKPPATGGLSSLGSPPQQLSAATPHGINDILSRPSMPVASGAALPSASPSGSSSSSSSSASASSASAAAAAAAAAAAAASSPAGLLAGLPRFSSLSPPPPPPGLYFSPSAAAVAAVGRYPKPLAELPGRTPIFWPGVMQSPPWRDARLACTPHQGSILLDKDGKRKHTRPTFSGQQIFALEKTFEQTKYLAGPERARLAYSLGMTESQVKVWFQNRRTKWRKKHAAEMATAKKKQDSETERLKGASENEEEDDDYNKPLDPNSDDEKITQLLKKHKSSSGGGGGLLLHASEPESSS

SEQ ID NO: 83 - protein, 802 aa, Artificial Sequence
  Synthetic
MYRSTKGASKARRDQINAEIRNLKELLPLAEADKARASYLHIMSLACIYTRKGVFFAGGTPLAGPTGLLSAQELEDIVAALPGFLLVFTAEGKLLYLSESVSEHLGHSMVDLVAQGDSIYDIIDPADHLTVRQQLTLPSALDTDRLFRCRFNTSKSLRRQSAGNKLVLIRGRFHAHPPGAYWAGNPVFTAFCAPLEPRPRPGPGPGPGPASLFLAMFQSRHAKDLALLDISESVLIYLGFERSELLCKSWYGLLHPEDLAHASAQHYRLLAESGDIQAEMVVRLQAKTGGWAWIYCLLYSEGPEGPITANNYPISDMEAWSLRQQLNSEDTQAAYVLGTPTMLPSFPENILSQEECSSTNPLFTAALGAPRSTSFPSAPELSVVSASEELPRPSKELDFSYLTFPSGPEPSLQAELSKDLVCTPPYTPHQPGGCAFLFSLHEPFQTHLPTPSSTLQEQLTPSTATFSDQLTPSSATFPDPLTSPLQGQLTETSVRSYEDQLTPCTSTFPDQLLPSTATFPEPLGSPAHEQLTPPSTAFQAHLDSPSQTFPEQLSPNPTKTYFAQEGCSFLYEKLPPSPSSPGNGDCTLLALAQLRGPLSVDVPLVPEGLLTPEASPVKQSFFHYSEKEQNEIDRLIQQISQLAQGMDRPFSAEAGTGGLEPLGGLEPLDSNLSLSGAGPPVLSLDLKPWKCQELDFLADPDNMFLEETPVEDIFMDLSTPDPSEEWGSGDPEAEGPGGAPSPCNNLSPEDHSFLEDLATYETAFETGVSAFPYDGFTDELHQLQSQVQDSFHEDGSGGEPTF

SEQ ID NO: 84 - protein, 241 aa, Artificial Sequence
  Synthetic
MFYSGLLTEGGRKETDMREAASLRQQRRMKQAVQFIHKDSADLLPLDGLKKLGSSKDMQPHNILQRRLMETNLSKLRSGPRVPWASKTNKLNQAKSEGLKKSEEDDMILVSCQCAGKDVKALVDTGCLYNLISLACVDRLGLKEHVKSHKHEGEKLSLPRHLKVVGQIEHAVITAGSLRLDCPAAVVDDNEKNASAGLQTLRSLKCIINLDKHRLIMGKTDKEEIPFVETVSLNEDNTSEA

SEQ ID NO: 85 - protein, 360 aa, Artificial Sequence
  Synthetic
MAGHLASDFAFSPPPGGGGDGPGGPEPGWVDPRTWLSFQGPPGGPGIGPGVGPGSEVWGIPPCPPPYEFCGGMAYCGPQVGVGLVPQGGLETSQPEGEAGVGVESNSDGASPEPCTVTPGAVKLEKEKLEQNPEESQDIKALQKELEQFAKLLKQKRITLGYTQADVGLTLGVLFGKVFSQTTICRFEALQLSFKNMCKARPAAQKWVEEADNNENLQEICKAETLVQARKRKRTSIENRVRGNLENLFLQCPKPTLQQISHIAQQLGLEKDVVRVWFCNRRQKGKRSSSDYAQREDFEAAGSPFSGGPVSFPLAPGPHFGTPGYGSPHFTALYSSVPFPEGEAFPPVSVTTLGSPMHSN

SEQ ID NO: 86 - protein, 323 aa, Artificial Sequence
  Synthetic
MDSDASLVSSRPSSPEPDDLFLPARSKGSSGSAFTGGTVSSSTPSDCPPELSAELRGAMGSAGAHPGDKLGGSGFKSSSSSTSSSTSSAAASSTKKDKKQMTEPEAQQARLKINSRERKRMHDLNIAMDGLREVMPYAHGPSVRKLSKIATLLLARNYILMLTNSLEEMKRLVSEIYGGHHAGFHPSACGGLAHSAPLPAATAHPAAAAHAAHHPAVHHPILPPAAAAAAAAAAAAAVSSASLPGSGLPSVGSIRPPHGLLKSPSAAAAAPLGGGGGGSGASGGFQHWGGMPCPCSMCQVPPPHHHVSAMGAGSLPRLTSDAK

SEQ ID NO: 87 - protein, 422 aa, Artificial Sequence
  Synthetic
MQNSHSGVNQLGGVFVNGRPLPDSTRQKIVELAHSGARPCDISRILQVSNGCVSKILGRYYETGSIRPRAIGGSKPRVATPEVVSKIAQYKRECPSIFAWEIRDRLLSEGVCTNDNIPSVSSINRVLRNLASEKQQMGADGMYDKLRMLNGQTGSWGTRPGWYPGTSVPGQPTQDGCQQQEGGGENTNSISSNGEDSDEAQMRLQLKRKLQRNRTSFTQEQIEALEKEFERTHYPDVFARERAAAKADLPEARIQVWFSNRRAKWRREEKLRNQRRQASNTPSHIPISSSFSTSVYQPIPQPTTPVSSFTSGSMLGRTDTALTNTYSALPPMPSFTMANNLPMQPPVPSQTSSYSCMLPTSPSVNGRSYDTYTPPHMQTHMNSQPMGTSGTTSTGLISPGVSVPVQVPGSEPDMSQYWPRLQ

SEQ ID NO: 88 - protein, 520 aa, Artificial Sequence
  Synthetic
MAALPGTVPRMMRPAPGQNYPRTGFPLEVSTPLGQGRVNQLGGVFINGRPLPNHIRHKIVEMAHHGIRPCVISRQLRVSHGCVSKILCRYQETGSIRPGAIGGSKPRQVATPDVEKKIEEYKRENPGMFSWEIRDRLLKDGHCDRSTVPSGAVSSASRVLRIKFGKKEEEDEADKKEDDGEKKAKHSIDGILGDKGNRLDEGSDVESEPDLPLKRKQRRSRTTFTAEQLEELEKAFERTHYPDIYTREELAQRTKLTEARVQVWFSNRRARWRKQAGANQLAAFNHLLPGGFPPTGMPTLPPYQLPDSTYPTTTISQDGGSTVHRPQPLPPSTMHQGGLAAAAAAADTSSAYGARHSFSSYSDSFMNPAAPSNHMNPVSNGLSPQVMSILGNPSAVPPQPQADFSISPLHGGLDSATSISASCSQRADSIKPGDSLPTSQAYCPPTYSTTGYSVDPVAGYQYGQYGQSECLVPWASPVPIPSPTPRASCLFMESYKVVSGWGMSISQMEKLKSSQMEQFT

SEQ ID NO: 89 - protein, 249 aa, Artificial Sequence
  Synthetic
MNGEEQYYAATQLYKDPCAFQRGPAPEFSASPPACLYMGRQPPPPPPHPFPGALGALEQGSPPDISPYEVPPLADDPAVAHAHHHAPAQLALPHPPAGPFPEGAEPGVLEEPNRVQLPFPWMKSTKAHAWKGQWAGGAYAAEPEENKRTRTAYTRAQLLELEKEFLFNKYISRPRRVELAVMLNLTERHIKIWFQNRRMKWKKEEDKKRGGGTAVGGGGVAEPEQDCAVTSGEELLALPPPPPPGGAVP

SEQ ID NO: 90 - protein, 689 aa, Artificial Sequence
  Synthetic
MEDTGIQRGIWDGDAKAVQQCLTDIFTSVYTTCDIPENAIFGPCVLSHTSLYDSIAFIALKSTDKRTVPYIFRVDTSAANGSSEGLMWLRLVQSARDKEEQNLEAYIKNGQLFYRSARRAAKDEELLVWYGKELTELLLLCPSRSHNKMNGSSPYTCLECSQRFQFEFPYVAHLRFRCPKRLHSADISPQDEQGGGVGTKDHGGGGGGGKDQQQQQQEAPLGPGPKFCKAGPLHHYPSPSPESSNPSAAAGGSSAKPSTDFHNLARELENSRGGSSCSPAQSLSSGSGSGGGGGHQEAELSPDGIATGGGKGKRKFPEEAAEGGGGAGLVGGRGRFVERPLPASKEDLVCTPQQYRASGSYFGLEENGRLFAPPSPETGEAKRSAFVEVKKAARAASLQEEGTADGAGVASEDQDAGGGGGSSTPAAASPVGAEKLLAPRPGGPLPSRLEGGSPARGSAFTSVPQLGSAGSTSGGGGTGAGAAGGAGGGQGAASDERKSAFSQPARSFSQLSPLVLGQKLGALEPCHPADGVGPTRLYPAAADPLAVKLQGAADLNGGCGSLPSGGGGLPKQSPFLYATAFWPKSSAAAAAAAAAAAAGPLQLQLPSALTLLPPSFTSLCLPAQNWCAKCNASFRMTSDLVYHMRSHHKKEYAMEPLVKRRREEKLKCPICNESFRERHHLSRHMTSHN

SEQ ID NO: 91 - protein, 733 aa, Artificial Sequence
  Synthetic
MERRSESPCLRDSPDRRSGSPDVKGPPPVKVARLEQNGSPMGARGRPNGAVAKAVGGLMIPVFCVVEQLDGSLEYDNREEHAEFVLVRKDVLFSQLVETALLALGYSHSSAAQAQGIIKLGRWNPLPLSYVTDAPDATVADMLQDVYHVVTLKIQLQSCSKLEDLPAEQWNHATVRNALKELLKEMNQSTLAKECPLSQSMISSIVNSTYYANVSATKCQEFGRWYKKYKKIKVERVERENLSDYCVLGQRPMHLPNMNQLASLGKTNEQSPHSQIHHSTPIRNQVPALQPIMSPGLLSPQLSPQLVRQQIAMAHLINQQIAVSRLLAHQHPQAINQQFLNHPPIPRAVKPEPTNSSVEVSPDIYQQVRDELKRASVSQAVFARVAFNRTQGLLSEILRKEEDPRTASQSLLVNLRAMQNFLNLPEVERDRIYQDERERSMNPNVSMVSSASSSPSSSRTPQAKTSTPTTDLPIKVDGANINITAAIYDEIQQEMKRAKVSQALFAKVAANKSQGWLCELLRWKENPSPENRTLWENLCTIRRFLNLPQHERDVIYEEESRHHHSERMQHVVQLPPEPVQVLHRQQSQPAKESSPPREEAPPPPPPTEDSCAKKPRSRTKASAEALGILQSFIHDVGLYPDQEAIHTLSAQLDLPKHTIIKFFQNQRYHVKHHGKLKEHLGSAVDVAEYKDEELLTESEENDSEEGSEEMYKVEAEEENADKSKAAPAEIDQR

SEQ ID NO: 92 - protein, 355 aa, Artificial Sequence
  Synthetic
MEELTAFVSKSFDQKVKEKKEAITYREVLESGPLRGAKEPTGCTEAGRDDRSSPAVRAAGGGGGGGGGGGGGGGGGGVGGGGAGGGAGGGRSPVRELDMGAAERSREPGSPRLTEGRRKPTKAEVQATLLLPGEAFRFLVSPELKDRKEDAKGMEDEGQTKIKQRRSRTNFTLEQLNELERLFDETHYPDAFMREELSQRLGLSEARVQVWFQNRRAKCRKQENQLHKGVLIGAASQFEACRVAPYVNVGALRMPFQQDSHCNVTPLSFQVQAQLQLDSAVAHAHHHLHPHLAAHAPYMMFPAPPFGLPLATLAADSASAASVVAAAAAAKTTSKNSSAADARLKAKKHAAALGL

SEQ ID NO: 93 - protein, 317 aa, Artificial Sequence
  Synthetic
MYNMMETELKPPGPQQTSGGGGGNSTAAAAGGNQKNSPDRVKRPMNAFMVWSRGQRRKMAQENPKMHNSEASKRAGAEWKLLSETEKRPFIDEAKRLRALHMKEHPDYKYRPRRKTKTLMKKDKYTLPGGLLAPGGNSMASGVGVGAGLGAGVNQRMDSYAHMNGWSNGSYSMMQDQLGYPQHPGLNAHGAAQMQPMHRYDVSALQYNSMTSSQTYMNGSPTYSMSYSQQGTPGMALGSMGSVVKSEASSSPPVVTSSSHSRAPCQAGDLRDMISMYLPGAEVPEPAAPSRLHMSQHYQSGPVPGTAINGTLPLSHM

SEQ ID NO: 94 - protein, 509 aa, Artificial Sequence
  Synthetic
MNLLDPFMKMTDEQEKGLSGAPSPTMSEDSAGSPCPSGSGSDTENTRPQENTFPKGEPDLKKESEEDKFPVCIREAVSQVLKGYDWTLVPMPVRVNGSSKNKPHVKRPMNAFMVWAQAARRKLADQYPHLHNAELSKTLGKAWRLLNESEKRPFVEEAERLRVQHKKDHPDYKYQPRRRKSVKNGQAEAEEATEQTHISPNAIFKALQADSPHSSSGMSEVHSPGEHSGQSQGPPTPPTTPKTDVQPGKADLKREGRPLPEGGRQPPIDFRDVDIGELSSDVISNIETFDVNEFDQYLPPNGHPGVPATHGQVTYTGSYGISSTAATPASAGHVWMSKQQAPPPPPQQPPQAPPAPQAPPQPQAAPPQQPAAPPQQPQAHTLTTLSSEPGQSQRTHIKTEQLSPSHYSEQQQHSPQQIAYSPFNLPHYSPSYPPITRSQYDYTDHQNSSSYYSHAAGQGTGLYSTFTYMNPAQRPMYTPIADTSGVPSIPQTHSPQHWEQPVYTQLTRP

SEQ ID NO: 95 - protein, 682 aa, Artificial Sequence
  Synthetic
MQLEHCLSPSIMLSKKFLNVSSSYPHSGGSELVLHDHPIISTTDNLERSSPLKKITRGMTNQSDTDNFPDSKDSPGDVQRSKLSPVLDGVSELRHSFDGSAADRYLLSQSSQPQSAATAPSAMFPYPGQHGPAHPAFSIGSPSRYMAHHPVITNGAYNSLLSNSSPQGYPTAGYPYPQQYGHSYQGAPFYQFSSTQPGLVPGKAQVYLCNRPLWLKFHRHQTEMIITKQGRRMFPFLSFNISGLDPTAHYNIFVDVILADPNHWRFQGGKWVPCGKADTNVQGNRVYMHPDSPNTGAHWMRQEISAGKAKLTNNKGASNNNGQMVVLQSLHKYQPRLHVVEVNEDGTEDTSQPGRVQTFTFPETQFIAVTAYQNTDITQLKIDHNPFAKGFRDNYDTIYTGCDMDRLTPSPNDSPRSQIVPGARYAMAGSFLQDQFVSNYAKARFHPGAGAGPGPGTDRSVPHTNGLLSPQQAEDPGAPSPQRWFVTPANNRLDFAASAYDTATDFAGNAATLLSYAAAGVKALPLQAAGCTGRPLGYYADPSGWGARSPPQYCGTKSGSVLPCWPNSAAAAARMAGANPYLGEEAEGLAAERSPLPPGAAEDAKPKDLSDSSWIETPSSIKSIDSSDSGIYEQAKRRRISPADTPVSESSSPLKSEVLAQRDCEKNCAKDISGYYGFYSHS

SEQ ID NO: 96 - protein, 513 aa, Artificial Sequence
  Synthetic
MADADEALAGAHLWSLTQKTCLRFEPRARSGPPASPPGRPRSRLHPAGMEGIKVFLHERELWLKFHEVTEMIITKAGRRMFPSYKVKVTGINPKTKYILLMDIVPADDHRYKFADNKWCVTGKAEPAMAGRLYVHPDSPATGAHWMRQAVSAQKLKLTNNHLDPFGHIILNSMHKYQPRLHIVKADENNGFGSKNTAFCTHVFPETAFIAVTSYQNHKITQLKIENNPFAKGFRGSDDMELHRMSRMQSKEYPVVPRSTVRQKVASNHSPFSSESRALSTSSNLGSQYQCENGVSGPSQDLLPPPNPYPLPQEHSQIYHCTKRKEEECSTTDHPYKKPYMETSPSEEDSFYRSSYPQQQGLGASYRTESAQRQACMYASSAPPSEPVPSLEDISCNTWPSMPSYSSCTVTTVQPWTGYPTSTSPLTSPRGPWSLGWLAWQPWLPTAGRGNVPSTRPPVAHQPVVSSVGPQTGLQSPGTLQPPEFLYSHGVQGLYPLISTTLCTELAWCRVERQ

SEQ ID NO: 97 - protein, 607 aa, Artificial Sequence
  Synthetic
MAEKRRGSPCSMLSLKAHAFSVEALIGAEKQQQLQKKRRKLGAEEAAGAVDDGGCSRGGGAGEKGSSEGDEGAALPPPAGATSGPARSGADLERGAAGGCEDGFQQGASPLASPGGSPKGSPARSLARPGTPLPSPQAPRVDLQGAELWKRFHEIGTEMIITKAGRRMFPAMRVKISGLDPHQQYYIAMDIVPVDNKRYRYVYHSSKWMVAGNADSPVPPRVYIHPDSPASGETWMRQAISADKLKLTNNELDDQGHIILHSMHKYQPRVHVIRKDCGDDLSPIKPVPSGEGVKAFSFPETVFTTVTAYQNQQITRLKIDRNPFAKGFRDSGRNRMGLEALVESYAFWRPSLRTLTFEDIPGIPKQGNASSSTLLQGTGNGVPATHPHLLSGSSCSSPAFHLGPNTSQLCSLAPADYSACARSGLTLNRYSTSLAETYNRLTNQAGETFAPPRTPSYVGVSSSTSVNMSMGGTDGDTFSCPQTSLSMQISGMSPQLQYIMPSPSSNAFATNQTHQGSYNTFRLHSPCALYGYNFSTSPKLAASPEKIVSSQGSFLGSSPSGTMTDRQMLPPVEGVHLLSSGGQQSFFDSRTLGSLTLSSSQVSAHMV

SEQ ID NO: 98 - protein, 447 aa, Artificial Sequence
  Synthetic
MLLDAGPQYPAIGVTTFGASRHHSAGDAAERDAGLGINPFADGMGAFKLNPSSHELASAGQTAFTSQAPGYAAAAALGHHHHPGHVGSYSSAAFNSTRDFLFRNRGFGDAAAAASAQHSLFAASAGGFGGPHGHTDAAGHLLFPGLHEQAAGHASPNVVNGQMRLGFSGDMYPRPEQYGQVTSPRSEHYAAPQLHGYGPMNVNMAAHHGAGAFFRYMRQPIKQELICKWIEPEQLANPKKSCNKTFSTMHELVTHVTVEHVGGPEQSNHICFWEECPREGKPFKAKYKLVNHIRVHTGEKPFPCPFPGCGKVFARSENLKIHKRTHTGEKPFKCEFEGCDRRFANSSDRKKHMHVHTSDKPYLCKMCDKSYTHPSSLRKHMKVHESSSQGSQPSPAASSGYESSTPPTIVSPSTDNPTTSSLSPSSSAVHHTAGHSALSSNFNEWYV

SEQ ID NO: 99 - protein, 9 aa, Artificial Sequence
  Synthetic
ESGGGGSPG

SEQ ID NO: 100 - protein, 13 aa, Artificial Sequence
  Synthetic
GGSGGSGGSGGSH

SEQ ID NO: 101 - protein, 7 aa, Artificial Sequence
  Synthetic
PKKKRKV

SEQ ID NO: 102 - protein, 9 aa, Homo sapiens
PAAKRVKLD

SEQ ID NO: 103 - protein, 16 aa, Homo sapiens
KRPAATKKAGQAKKKK

SEQ ID NO: 104 - protein, 11 aa, Artificial Sequence
  Synthetic
RRRRRRRRRRR

SEQ ID NO: 105 - protein, 239 aa, Artificial Sequence
  Synthetic
MASKGERLFRGKVPILVELKGDVNGHKFSVRGKGKGDATRGKLTLKFICTTGKLPVPWPTLVTTLTYGVQCFSRYPKHMKRHDFFKSAMPKGYVQERTISFKKDGKYKTRAEVKFEGRTLVNRIKLKGRDFKEKGNILGHKLRYNFNSHKVYITADKRKNGIKAKFKIRHNVKDGSVQLADHYQQNTPIGRGPVLLPRNHYLSTRSKLSKDPKEKRDHMVLLEFVTAAGIKHGRDERYK

SEQ ID NO: 106 - protein, 20 aa, Artificial Sequence
  Synthetic
MGSSHHHHHHSSGLVPRGSH

SEQ ID NO: 107 - protein, 508 aa, Artificial Sequence
  Synthetic
MASKGERLFRGKVPILVELKGDVNGHKFSVRGKGKGDATRGKLTLKFICTTGKLPVPWPTLVTTLTYGVQCFSRYPKHMKRHDFFKSAMPKGYVQERTISFKKDGKYKTRAEVKFEGRTLVNRIKLKGRDFKEKGNILGHKLRYNFNSHKVYITADKRKNGIKAKFKIRHNVKDGSVQLADHYQQNTPIGRGPVLLPRNHYLSTRSKLSKDPKEKRDHMVLLEFVTAAGIKHGRDERYKGGSGGSGGSGGSHMESSAKMESGGAGQQPQPQPQQPFLPPAACFFATAAAAAAAAAAAAAQSAQQQQQQQQQQQQAPQLRPAADGQPSGGGHKSAPKQVKRQRSSSPELMRCKRRLNFSGFGYSLPQQQPAAVARRNERERNRVKLVNLGFATLREHVPNGAANKKMSKVETLRSAVEYIRAAQQLLDEHDAVSAAFQAGVLSPTISPNYSNDLNSMAGSPVSSYSSDEGSYDPLSPEEQELLDFTNWFESGGGGSPGRRRRRRRRRRR

SEQ ID NO: 108 - protein, 755 aa, Artificial Sequence
  Synthetic
MASKGERLFRGKVPILVELKGDVNGHKFSVRGKGKGDATRGKLTLKFICTTGKLPVPWPTLVTTLTYGVQCFSRYPKHMKRHDFFKSAMPKGYVQERTISFKKDGKYKTRAEVKFEGRTLVNRIKLKGRDFKEKGNILGHKLRYNFNSHKVYITADKRKNGIKAKFKIRHNVKDGSVQLADHYQQNTPIGRGPVLLPRNHYLSTRSKLSKDPKEKRDHMVLLEFVTAAGIKHGRDERYKGGSGGSGGSGGSHMAADEVAGGARKATKSKLFEFLVHGVRPGMPSGARMPHQGAPMGPPGSPYMGSPAVRPGLAPAGMEPARKRAAPPPGQSQAQSQGQPVPTAPARSRSAKRRKMADKILPQRIRELVPESQAYMDLLAFERKLDQTIMRKRVDIQEALKRPMKQKRKLRLYISNTFNPAKPDAEDSDGSIASWELRVEGKLLDDPSKQKRKFSSFFKSLVIELDKDLYGPDNHLVEWHRTPTTQETDGFQVKRPGDLSVRCTLLLMLDYQPPQFKLDPRAARAAGLHTQSRSAIVQALWQYVKTNRLQDSHDKEYINGDKYFQQIFDCPRLKFSEIPQRLTALLLPPDPIVINHVISVDPSDQKKTACYDIDVEVEEPLKGQMSSFLLSTANQQEISALDSKIHETIESINQLKIQRDFMLSFSRDPKGYVQDLLRSQSRDLKVMTDVAGNPEEERRAEFYHQPWSQEAVSRYFYCKIQQRRQELEQSLVVRNTESGGGGSPGRRRRRRRRRRR

SEQ ID NO: 109 - protein, 715 aa, Artificial Sequence
  Synthetic
MASKGERLFRGKVPILVELKGDVNGHKFSVRGKGKGDATRGKLTLKFICTTGKLPVPWPTLVTTLTYGVQCFSRYPKHMKRHDFFKSAMPKGYVQERTISFKKDGKYKTRAEVKFEGRTLVNRIKLKGRDFKEKGNILGHKLRYNFNSHKVYITADKRKNGIKAKFKIRHNVKDGSVQLADHYQQNTPIGRGPVLLPRNHYLSTRSKLSKDPKEKRDHMVLLEFVTAAGIKHGRDERYKGGSGGSGGSGGSHMATAASNHYSLLTSSASIVHAEPPGGMQQGAGGYREAQSLVQGDYGALQSNGHPLSHAHQWITALSHGGGGGGGGGGGGGGGGGGGGGDGSPWSTSPLGQPDIKPSVVVQQGGRGDELHGPGALQQQHQQQQQQQQQQQQQQQQQQQQQRPPHLVHHAANHHPGPGAWRSAAAAAHLPPSMGASNGGLLYSQPSFTVNGMLGAGGQPAGLHHHGLRDAHDEPHHADHHPHPHSHPHQQPPPPPPPQGPPGHPGAHHDPHSDEDTPTSDDLEQFAKQFKQRRIKLGFTQADVGLALGTLYGNVFSQTTICRFEALQLSFKNMCKLKPLLNKWLEEADSSSGSPTSIDKIAAQGRKRKKRTSIEVSVKGALESHFLKCPKPSAQEITSAADSAQLEKEVVRVWFCNRRQKEKRMTPPGGTLPGAEDVYGGSRDTPPHHGVQTPVQESGGGGSPGRRRRRRRRRRR

SEQ ID NO: 110 - protein, 633 aa, Artificial Sequence
  Synthetic
MASKGERLFRGKVPILVELKGDVNGHKFSVRGKGKGDATRGKLTLKFICTTGKLPVPWPTLVTTLTYGVQCFSRYPKHMKRHDFFKSAMPKGYVQERTISFKKDGKYKTRAEVKFEGRTLVNRIKLKGRDFKEKGNILGHKLRYNFNSHKVYITADKRKNGIKAKFKIRHNVKDGSVQLADHYQQNTPIGRGPVLLPRNHYLSTRSKLSKDPKEKRDHMVLLEFVTAAGIKHGRDERYKGGSGGSGGSGGSHMATAASNPYSILSSTSLVHADSAGMQQGSPFRNPQKLLQSDYLQGVPSNGHPLGHHWVTSLSDGGPWSSTLATSPLDQQDVKPGREDLQLGAIIHHRSPHVAHHSPHTNHPNAWGASPAPNPSITSSGQPLNVYSQPGFTVSGMLEHGGLTPPPAAASAQSLHPVLREPPDHGELGSHHCQDHSDEETPTSDELEQFAKQFKQRRIKLGFTQADVGLALGTLYGNVFSQTTICRFEALQLSFKNMCKLKPLLNKWLEEADSSTGSPTSIDKIAAQGRKRKKRTSIEVSVKGVLETHFLKCPKPAAQEISSAADSAQLEKEVVRVWFCNRRQKEKRMTPPGDQQPHEVYSHTVKTDTSCHDLESGGGGSPGRRRRRRRRRRR

SEQ ID NO: 111 - protein, 2226 aa, Artificial Sequence
  Synthetic
MASKGERLFRGKVPILVELKGDVNGHKFSVRGKGKGDATRGKLTLKFICTTGKLPVPWPTLVTTLTYGVQCFSRYPKHMKRHDFFKSAMPKGYVQERTISFKKDGKYKTRAEVKFEGRTLVNRIKLKGRDFKEKGNILGHKLRYNFNSHKVYITADKRKNGIKAKFKIRHNVKDGSVQLADHYQQNTPIGRGPVLLPRNHYLSTRSKLSKDPKEKRDHMVLLEFVTAAGIKHGRDERYKGGSGGSGGSGGSHMRGPVGTEEELPRLFAEEMENEDEMSEEEDGGLEAFDDFFPVEPVSLPKKKKPKKLKENKCKGKRKKKEGSNDELSENEEDLEEKSESEGSDYSPNKKKKKKLKDKKEKKAKRKKKDEDEDDNDDGCLKEPKSSGQLMAEWGLDDVDYLFSEEDYHTLTNYKAFSQFLRPLIAKKNPKIPMSKMMTVLGAKWREFSANNPFKGSSAAAAAAAVAAAVETVTISPPLAVSPPQVPQPVPIRKAKTKEGKGPGVRKKIKGSKDGKKKGKGKKTAGLKFRFGGISNKRKKGSSSEEDEREESDFDSASIHSASVRSECSAALGKKSKRRRKKKRIDDGDGYETDHQDYCEVCQQGGEIILCDTCPRAYHLVCLDPELEKAPEGKWSCPHCEKEGIQWEPKDDDDEEEEGGCEEEEDDHMEFCRVCKDGGELLCCDACPSSYHLHCLNPPLPEIPNGEWLCPRCTCPPLKGKVQRILHWRWTEPPAPFMVGLPGPDVEPSLPPPKPLEGIPEREFFVKWAGLSYWHCSWVKELQLELYHTVMYRNYQRKNDMDEPPPFDYGSGDEDGKSEKRKNKDPLYAKMEERFYRYGIKPEWMMIHRILNHSFDKKGDVHYLIKWKDLPYDQCTWEIDDIDIPYYDNLKQAYWGHRELMLGEDTRLPKRLLKKGKKLRDDKQEKPPDTPIVDPTVKFDKQPWYIDSTGGTLHPYQLEGLNWLRFSWAQGTDTILADEMGLGKTVQTIVFLYSLYKEGHSKGPYLVSAPLSTIINWEREFEMWAPDFYVVTYTGDKESRSVIRENEFSFEDNAIRSGKKVFRMKKEVQIKFHVLLTSYELITIDQAILGSIEWACLVVDEAHRLKNNQSKFFRVLNSYKIDYKLLLTGTPLQNNLEELFHLLNFLTPERFNNLEGFLEEFADISKEDQIKKLHDLLGPHMLRRLKADVFKNMPAKTELIVRVELSQMQKKYYKFILTRNFEALNSKGGGNQVSLLNIMMDLKKCCNHPYLFPVAAVEAPVLPNGSYDGSSLVKSSGKLMLLQKMLKKLRDEGHRVLIFSQMTKMLDLLEDFLEYEGYKYERIDGGITGGLRQEAIDRFNAPGAQQFCFLLSTRAGGLGINLATADTVIIYDSDWNPHNDIQAFSRAHRIGQNKKVMIYRFVTRASVEERITQVAKRKMMLTHLVVRPGLGSKSGSMTKQELDDILKFGTEELFKDDVEGMMSQGQRPVTPIPDVQSSKGGNLAASAKKKHGSTPPGDNKDVEDSSVIHYDDAAISKLLDRNQDATDDTELQNMNEYLSSFKVAQYVVREEDGVEEVEREIIKQEENVDPDYWEKLLRHHYEQQQEDLARNLGKGKRIRKQVNYNDASQEDQEWQDELSDNQSEYSIGSEDEDEDFEERPEGQSGRRQSRRQLKSDRDKPLPPLLARVGGNIEVLGFNARQRKAFLNAIMRWGMPPQDAFNSHWLVRDLRGKSEKEFRAYVSLFMRHLCEPGADGAETFADGVPREGLSRQHVLTRIGVMSLVRKKVQEFEHVNGKYSTPDLIPEGPEGKKSGEVISSDPNTPVPASPAHLLPAPLGLPDKMEAQLGYMDEKDPGAQKPRQPLEVQALPAALDRVESEDKHESPASKERAREERPEETEKAPPSPEQLPREEVLPEKEKILDKLELSLIHSRGDSSELRPDDTKAEEKEPIETQQNGDKEEDDEGKKEDKKGKFKFMFNIADGGFTELHTLWQNEERAAVSSGKIYDIWHRRHDYWLLAGIVTHGYARWQDIQNDPRYMILNEPFKSEVHKGNYLEMKNKFLARRFKLLEQALVIEEQLRRAAYLNMTQDPNHPAMALNARLAEVECLAESHQHLSKESLAGNKPANAVLHKVLNQLEELLSDMKADVTRLPSMLSRIPPVAARLQMSERSILSRLTNRAGDPTIQQGAFGSSQMYSNNFGPNFRGPGPGGIVNYNQMPLGPYVTDIESGGGGSPGRRRRRRRRRRR

SEQ ID NO: 112 - protein, 726 aa, Artificial Sequence
  Synthetic
MASKGERLFRGKVPILVELKGDVNGHKFSVRGKGKGDATRGKLTLKFICTTGKLPVPWPTLVTTLTYGVQCFSRYPKHMKRHDFFKSAMPKGYVQERTISFKKDGKYKTRAEVKFEGRTLVNRIKLKGRDFKEKGNILGHKLRYNFNSHKVYITADKRKNGIKAKFKIRHNVKDGSVQLADHYQQNTPIGRGPVLLPRNHYLSTRSKLSKDPKEKRDHMVLLEFVTAAGIKHGRDERYKGGSGGSGGSGGSHMDFFRVVENQQPPATMPLNVSFTNRNYDLDYDSVQPYFYCDEEENFYQQQQQSELQPPAPSEDIWKKFELLPTPPLSPSRRSGLCSPSYVAVTPFSLRGDNDGGGGSFSTADQLEMVTELLGGDMVNQSFICDPDDETFIKNIIIQDCMWSGFSAAAKLVSEKLASYQAARKDSGSPNPARGHSVCSTSSLYLQDLSAAASECIDPSVVFPYPLNDSSSPKSCASQDSSAFSPSSDSLLSSTESSPQGSPEPLVLHEETPPTTSSDSEEEQEDEEEIDVVSVEKRQAPGKRSESGSPSAGGHSKPPHSPLVLKRCHVSTHQHNYAAPPSTRKDYPAAKRVKLDSVRVLRQISNNRKCTSPRSSDTEENVKRRTHNVLERQRRNELKRSFFALRDQIPELENNEKAPKVVILKKATAYILSVQAEEQKLISEEDLLRKRREQAKHKAEQLRNSCAESGGGGSPGRRRRRRRRRRR

SEQ ID NO: 113 - protein, 527 aa, Artificial Sequence
  Synthetic
MASKGERLFRGKVPILVELKGDVNGHKFSVRGKGKGDATRGKLTLKFICTTGKLPVPWPTLVTTLTYGVQCFSRYPKHMKRHDFFKSAMPKGYVQERTISFKKDGKYKTRAEVKFEGRTLVNRIKLKGRDFKEKGNILGHKLRYNFNSHKVYITADKRKNGIKAKFKIRHNVKDGSVQLADHYQQNTPIGRGPVLLPRNHYLSTRSKLSKDPKEKRDHMVLLEFVTAAGIKHGRDERYKGGSGGSGGSGGSHMTMTTMPESLNSPVSGKAVFMEFGPPNQQMSPSPMSHGHYSMHCLHSAGHSQPDGAYSSASSFSRPLGYPYVNSVSSHASSPYISSVQSYPGSASLAQSRLEDPGADSEKSTVVEGGEVRFNGKGKKIRKPRTIYSSLQLQALNRRFQQTQYLALPERAEAAASAGLTQTQVKIWFQNKRSKFKKLMKQGGAALEGSALANGRALSAGSPPVPPGWNPNSSSGKGSGGNAGSYIPSYTSWYPSAHQEAMQQPQLMESGGGGSPGRRRRRRRRRRR

SEQ ID NO: 114 - protein, 600 aa, Artificial Sequence
  Synthetic
MASKGERLFRGKVPILVELKGDVNGHKFSVRGKGKGDATRGKLTLKFICTTGKLPVPWPTLVTTLTYGVQCFSRYPKHMKRHDFFKSAMPKGYVQERTISFKKDGKYKTRAEVKFEGRTLVNRIKLKGRDFKEKGNILGHKLRYNFNSHKVYITADKRKNGIKAKFKIRHNVKDGSVQLADHYQQNTPIGRGPVLLPRNHYLSTRSKLSKDPKEKRDHMVLLEFVTAAGIKHGRDERYKGGSGGSGGSGGSHMTGVFDSLVADMHSTQIAASSTYHQHQQPPSGGGAGPGGNSSSSSSLHKPQESPTLPVSTATDSSYYTNQQHPAGGGGGGGSPYAHMGSYQYQASGLNNVPYSAKSSYDLGYTAAYTSYAPYGTSSSPANNEPEKEDLEPEIRIVNGKPKKVRKPRTIYSSFQLAALQRRFQKTQYLALPERAEAAASAGLTQTQVKIWFQNRRSKFKKMWKSGEIPSEQHPGASASPPCASPPVSAPASWDFGVPQRMAGGGGPGSGGSGAGSSGSSPSSAASAFLGNYPWYHQTSGSASHLQATAPLLHPTQTPQPHHHHHHHGGGGAPVSAGTIFESGGGGSPGRRRRRRRRRRR

SEQ ID NO: 115 - protein, 949 aa, Artificial Sequence
  Synthetic
MASKGERLFRGKVPILVELKGDVNGHKFSVRGKGKGDATRGKLTLKFICTTGKLPVPWPTLVTTLTYGVQCFSRYPKHMKRHDFFKSAMPKGYVQERTISFKKDGKYKTRAEVKFEGRTLVNRIKLKGRDFKEKGNILGHKLRYNFNSHKVYITADKRKNGIKAKFKIRHNVKDGSVQLADHYQQNTPIGRGPVLLPRNHYLSTRSKLSKDPKEKRDHMVLLEFVTAAGIKHGRDERYKGGSGGSGGSGGSHMMQESGTETKSNGSAIQNGSGGSNHLLECGGLREGRSNGETPAVDIGAADLAHAQQQQQQAAQVARQALLQQQQQQQVSGLKSPKRNDKQPALQVPVSVAMMTPQVITPQQMQQILQQQVLSPQQLQVLLQQQQALMLQQQQLQEFYKKQQEQLQLQLLQQQHAGKQPKEQQQVATQQLAFQQQLLQMQQLQQQHLLSLQRQGLLTIQPGQPALPLQPLAQGMIPTELQQLWKEVTSAHTAEETTGNNHSSLDLTTTCVSSSAPSKTSLIMNPHASTNGQLSVHTPKRESLSHEEHPHSHPLYGHGVCKWPGCEAVCEDFQSFLKHLNSEHALDDRSTAQCRVQMQVVQQLELQLAKDKERLQAMMTHLHVKSTEPKAAPQPLNLVSSVTLSKSASEASPQSLPHTPTTPTAPLTPVTQGPSVITTTSMHTVGPIRRRYSDKYNVPISSADIAQNQEFYKNAEVRPPFTYASLIRQAILESPEKQLTLNEIYNWFTRMFAYFRRNAATWKNAVRHNLSLHKCFVRVENVKGAVWTVDEVEFQKRRPQKISGNPSLIKNMQSSHAYCTPLNAALQASMAENSIPLYTTASMGNPTLGNLASAIREELNGAMEHTNSNESDSSPGRSPMQAVHPVHVKEEPLDPEEAEGPLSLVTTANHSPDFDHDRDYEDEPVNEDMEESGGGGSPGRRRRRRRRRRR

SEQ ID NO: 116 - protein, 986 aa, Artificial Sequence
  Synthetic
MASKGERLFRGKVPILVELKGDVNGHKFSVRGKGKGDATRGKLTLKFICTTGKLPVPWPTLVTTLTYGVQCFSRYPKHMKRHDFFKSAMPKGYVQERTISFKKDGKYKTRAEVKFEGRTLVNRIKLKGRDFKEKGNILGHKLRYNFNSHKVYITADKRKNGIKAKFKIRHNVKDGSVQLADHYQQNTPIGRGPVLLPRNHYLSTRSKLSKDPKEKRDHMVLLEFVTAAGIKHGRDERYKGGSGGSGGSGGSHMMQESATETISNSSMNQNGMSTLSSQLDAGSRDGRSSGDTSSEASTAEALHLQQQQAAQAARQALLQQQTSGLKSPKSSDKQRPLQVPVSVAMMTPQVITPQQMQQILQQQVLSPQQLQALLQQQQAVMLQQQQLQEFYKKQQEQLHLQLLQQQQQQQQQQQQQQQQQQQQQQQQQQQQQQQQQQQQQQQQHPGKQAKEQQQQQQQQQLAAQQLVFQQQLLHMQQLQQQQHLLSLQRQGLISIPPGQAALPVQSLPQAGLSPAEIQQLWKEVTGVHSMEDNGIKHGGLDLTTNNSSSTTSSNTSKASPPITHHSIVNGQSSVLSARRDSSSHEETGASHTLYGHGVCKWPGCESICEDFGQFLKHLNNEHALDDRSTAQCRVQMQVVQQLEIQLSKERERLQAMMTHLHMRPSEPKPSPKPLNLVSSVTMSKNMLETSPQSLPQTPTTPTAPVTPITQGPSVITPASVPNVGAIRRRHSDKYNIPMSSEIAPNYEFYKNADVRPPFTYATLIRQAIMESSDRQLTLNEIYSWFTRTFAYFRRNAATWKNAVRHNLSLHKCFVRVENVKGAVWTVDEVEYQKRRSQKITGSPTLVKNIPTSLGYGAALNASLQAALAESSLPLLSNPGLINNASSGLLQAVHEDLNGSLDHIDSNGNSSPGCSPQPHIHSIHVKEEPVIAEDEDCPMSLVTTANHSPELEDDREIEEEPLSEDLEESGGGGSPGRRRRRRRRRRR

SEQ ID NO: 117 - protein, 726 aa, Artificial Sequence
  Synthetic
MASKGERLFRGKVPILVELKGDVNGHKFSVRGKGKGDATRGKLTLKFICTTGKLPVPWPTLVTTLTYGVQCFSRYPKHMKRHDFFKSAMPKGYVQERTISFKKDGKYKTRAEVKFEGRTLVNRIKLKGRDFKEKGNILGHKLRYNFNSHKVYITADKRKNGIKAKFKIRHNVKDGSVQLADHYQQNTPIGRGPVLLPRNHYLSTRSKLSKDPKEKRDHMVLLEFVTAAGIKHGRDERYKGGSGGSGGSGGSHMPNPRPGKPSAPSLALGPSPGASPSWRAAPKASDLLGARGPGGTFQGRDLRGGAHASSSSLNPMPPSQLQLPTLPLVMVAPSGARLGPLPHLQALLQDRPHFMHQLSTVDAHARTPVLQVHPLESPAMISLTPPTTATGVFSLKARPGLPPGINVASLEWVSREPALLCTFPNPSAPRKDRSVDRAGKDPRPPIPSPDTLCPPSTLSAVPQSSYPLLANGVCKWPGCEKVFEEPEDFLKHCQADHLLDEKGRAQCLLQREMVQSAEQQAVAEKEKLSAMQAHLAGKMALTKASSVASSDKGSCCIVAAGSQGPVVPAWSGPREAPDSLFAVRRHLWGSHGNSTFPEFLHNMDYFKFHNMRPPFTYATLIRWAILEAPEKQRTLNEIYHWFTRMFAFFRNHPATWKNAIRHNLSLHKCFVRVESEKGAVWTVDELEFRKKRSQRPSRCSNPTPGPESGGGGSPGRRRRRRRRRRR

SEQ ID NO: 118 - protein, 715 aa, Artificial Sequence
  Synthetic
MASKGERLFRGKVPILVELKGDVNGHKFSVRGKGKGDATRGKLTLKFICTTGKLPVPWPTLVTTLTYGVQCFSRYPKHMKRHDFFKSAMPKGYVQERTISFKKDGKYKTRAEVKFEGRTLVNRIKLKGRDFKEKGNILGHKLRYNFNSHKVYITADKRKNGIKAKFKIRHNVKDGSVQLADHYQQNTPIGRGPVLLPRNHYLSTRSKLSKDPKEKRDHMVLLEFVTAAGIKHGRDERYKGGSGGSGGSGGSHMYQSLAMAANHGPPPGAYEAGGPGAFMHGAGAASSPVYVPTPRAPSSAAGLSYLQGGGAGSASGGASGGSSGGAASGAGPGTQQGSPGWSQAGADGAAYTPPPVSPRFSFPGTTGSLAAAAAAAAAREAAAYSSGGGAAGAGLAGREQYGRAGFAGSYSSPYPAYMADVGASWAAAAAASAGPFDSPVLHSLPGRANPAARHPNLVDMFDDFSEGRECVNCGAMSTPLWRRDGTGHYLCNACGLYHKMNGINRPLIKPQRRLSASRRVGLSCANCQTTTTTLWRRNAEGEPVCNACGLYMKLHGVPRPLAMRKEGIQTRKRKPKNLNKSKTPAAPSGSESLPPASGASSNSSNATTSSSEEMRPIKTEPGLSSHYGHSSSVSQTFSVSAMSGHGPSIHPVLSALKLSPQGYASPVSQSPQTSSKQDSWNSLVLADSHGDIITAESGGGGSPGRRRRRRRRRRR

SEQ ID NO: 119 - protein, 487 aa, Artificial Sequence
  Synthetic
MASKGERLFRGKVPILVELKGDVNGHKFSVRGKGKGDATRGKLTLKFICTTGKLPVPWPTLVTTLTYGVQCFSRYPKHMKRHDFFKSAMPKGYVQERTISFKKDGKYKTRAEVKFEGRTLVNRIKLKGRDFKEKGNILGHKLRYNFNSHKVYITADKRKNGIKAKFKIRHNVKDGSVQLADHYQQNTPIGRGPVLLPRNHYLSTRSKLSKDPKEKRDHMVLLEFVTAAGIKHGRDERYKGGSGGSGGSGGSHMNLVGSYAHHHHHHHPHPAHPMLHEPFLFGPASRCHQERPYFQSWLLSPADAAPDFPAGGPPPAAAAAATAYGPDARPGQSPGRLEALGGRLGRRKGSGPKKERRRTESINSAFAELRECIPNVPADTKASKAKTARLATSYIAYLMDVLAKDAQSGDPEAFKAELKKADGGRESKRKRELQQHEGFPPALGPVEKRIKGRTGWPQQVWALELNQESGGGGSPGRRRRRRRRRRR

SEQ ID NO: 120 - protein, 552 aa, Artificial Sequence
  Synthetic
MASKGERLFRGKVPILVELKGDVNGHKFSVRGKGKGDATRGKLTLKFICTTGKLPVPWPTLVTTLTYGVQCFSRYPKHMKRHDFFKSAMPKGYVQERTISFKKDGKYKTRAEVKFEGRTLVNRIKLKGRDFKEKGNILGHKLRYNFNSHKVYITADKRKNGIKAKFKIRHNVKDGSVQLADHYQQNTPIGRGPVLLPRNHYLSTRSKLSKDPKEKRDHMVLLEFVTAAGIKHGRDERYKGGSGGSGGSGGSHMPADIMEKNSSSPVAATPASVNTTPDKPKTASEHRKSSKPIMEKRRRARINESASQAKTAILDALKKDSSRHSKLEKADILEMTVKHLRNLQRAQMTAALSTDPSVLGKYRAGFSECMNEVTRFLSTCEGVNTEVRTRLLGHLANCMTQINAMTYPGQPHPALQAPPPPPPGPGGPQHAPFAPPPPLVPIPGGAAPPPGGAPCKLGSQAGEAAKVFGGFQVVPAPDGQFAFLIPNGAFAHSGPVIPVYTSNSGTSVGPNAVSPSSGPSLTADSMWRPWRNESGGGGSPGRRRRRRRRRRR

SEQ ID NO: 121 - protein, 438 aa, Artificial Sequence
  Synthetic
MASKGERLFRGKVPILVELKGDVNGHKFSVRGKGKGDATRGKLTLKFICTTGKLPVPWPTLVTTLTYGVQCFSRYPKHMKRHDFFKSAMPKGYVQERTISFKKDGKYKTRAEVKFEGRTLVNRIKLKGRDFKEKGNILGHKLRYNFNSHKVYITADKRKNGIKAKFKIRHNVKDGSVQLADHYQQNTPIGRGPVLLPRNHYLSTRSKLSKDPKEKRDHMVLLEFVTAAGIKHGRDERYKGGSGGSGGSGGSHMAPSTVAVELLSPKEKNRLRKPVVEKMRRDRINSSAEQAKALLEQEFARHQPNSKLEKADILEMAVSYLKHSKAFVAAAGPKSLHQDYSEGYSWCLQEAVQFLTLHAASDTQMKLLYHFQRPPAAPAAPAKEPKAPGAAPPPALSAKATAAAAAAHQPACGLWRPWESGGGGSPGRRRRRRRRRRR

SEQ ID NO: 122 - protein, 621 aa, Artificial Sequence
  Synthetic
MASKGERLFRGKVPILVELKGDVNGHKFSVRGKGKGDATRGKLTLKFICTTGKLPVPWPTLVTTLTYGVQCFSRYPKHMKRHDFFKSAMPKGYVQERTISFKKDGKYKTRAEVKFEGRTLVNRIKLKGRDFKEKGNILGHKLRYNFNSHKVYITADKRKNGIKAKFKIRHNVKDGSVQLADHYQQNTPIGRGPVLLPRNHYLSTRSKLSKDPKEKRDHMVLLEFVTAAGIKHGRDERYKGGSGGSGGSGGSHMGDMGDPPKKKRLISLCVGCGNQIHDQYILRVSPDLEWHAACLKCAECNQYLDESCTCFVRDGKTYCKRDYIRLYGIKCAKCSIGFSKNDFVMRARSKVYHIECFRCVACSRQLIPGDEFALREDGLFCRADHDVVERASLGAGDPLSPLHPARPLQMAAEPISARQPALRPHVHKQPEKTTRVRTVLNEKQLHTLRTCYAANPRPDALMKEQLVEMTGLSPRVIRVWFQNKRCKDKKRSIMMKQLQQQQPNDKTNIQGMTGTPMVAASPERHDGGLQANPVEVQSYQPPWKALSDAALQSDIDQPAFQQLVNFSEGGPGSNSTGSEVASMSSQLPDTPNSMVASPIEAESGGGGSPGRRRRRRRRRRR

SEQ ID NO: 123 - protein, 678 aa, Artificial Sequence
  Synthetic
MASKGERLFRGKVPILVELKGDVNGHKFSVRGKGKGDATRGKLTLKFICTTGKLPVPWPTLVTTLTYGVQCFSRYPKHMKRHDFFKSAMPKGYVQERTISFKKDGKYKTRAEVKFEGRTLVNRIKLKGRDFKEKGNILGHKLRYNFNSHKVYITADKRKNGIKAKFKIRHNVKDGSVQLADHYQQNTPIGRGPVLLPRNHYLSTRSKLSKDPKEKRDHMVLLEFVTAAGIKHGRDERYKGGSGGSGGSGGSHMLFHSLSGPEVHGVIDEMDRRAKSEAPAISSAIDRGDTETTMPSISSDRAALCAGCGGKISDRYYLLAVDKQWHARCAKCCECKLNLESELTCFSKDGSIYCKEDYYRRFSVQRCARCHLGISASEMVMRARDLVYHLNCFTCTTCNKMLTTGDHFGMKDSLVYCRLHFEALLQGEYPAHFNHADVAAAAAAAAAAKSAGLGAAGANPLGLPYYNGVGTVQKGRPRKRKSPGPGADLAAYNAALSCNENDAEHLDRDQPYPSSQKTKRMRTSFKHHQLRTMKSYFAINHNPDAKDLKQLAQKTGLTKRVLQVWFQNARAKFRRNLLRQENTGVDKSTDAALQTGTPSGPASELSNASLSPSSTPTTLTDLTSPTLPTVTSVLTSVPGNLEGHEPHSPSQTTLTNLFESGGGGSPGRRRRRRRRRRR

SEQ ID NO: 124 - protein, 751 aa, Artificial Sequence
  Synthetic
MASKGERLFRGKVPILVELKGDVNGHKFSVRGKGKGDATRGKLTLKFICTTGKLPVPWPTLVTTLTYGVQCFSRYPKHMKRHDFFKSAMPKGYVQERTISFKKDGKYKTRAEVKFEGRTLVNRIKLKGRDFKEKGNILGHKLRYNFNSHKVYITADKRKNGIKAKFKIRHNVKDGSVQLADHYQQNTPIGRGPVLLPRNHYLSTRSKLSKDPKEKRDHMVLLEFVTAAGIKHGRDERYKGGSGGSGGSGGSHMRQPPGESDMAVSDALLPSFSTFASGPAGREKTLRQAGAPNNRWREELSHMKRLPPVLPGRPYDLAAATVATDLESGGAGAACGGSNLAPLPRRETEEFNDAADLDAILSNSLTHPPESVAATVSSSASASSSSSPSSSGPASAPSTCSFTYPIRAGNDPGVAPGGTGGGLLYGRESAPPPTAPFNLADINDVSPSGGFVAELLRPELDPVYIPPQQPQPPGGGLMGKFVLKASLSAPGSEYGSPSVISVSKGSPDGSHPVVVAPYNGGPPRTCPKIKQEAVSSCTHLGAGPPLSNGHRPAAHDFPLGRQLPSRTTPTLGLEEVLSSRDCHPALPLPPGFHPHPGPNYPSFLPDQMQPQVPPLHYQELMPPGSCMPEEPKPKRGRRSWPRKRTATHTCDYAGCGKTYTKSSHLKAHLRTHTGEKPYHCDWDGCGWKFARSDELTRHYRKHTGHRPFQCQKCDRAFSRSDHLALHMKRHFESGGGGSPGRRRRRRRRRRR

SEQ ID NO: 125 - protein, 625 aa, Artificial Sequence
  Synthetic
MASKGERLFRGKVPILVELKGDVNGHKFSVRGKGKGDATRGKLTLKFICTTGKLPVPWPTLVTTLTYGVQCFSRYPKHMKRHDFFKSAMPKGYVQERTISFKKDGKYKTRAEVKFEGRTLVNRIKLKGRDFKEKGNILGHKLRYNFNSHKVYITADKRKNGIKAKFKIRHNVKDGSVQLADHYQQNTPIGRGPVLLPRNHYLSTRSKLSKDPKEKRDHMVLLEFVTAAGIKHGRDERYKGGSGGSGGSGGSHMAAELAMGAELPSSPLAIEYVNDFDLMKFEVKKEPPEAERFCHRLPPGSLSSTPLSTPCSSVPSSPSFCAPSPGTGGGGGAGGGGGSSQAGGAPGPPSGGPGAVGGTSGKPALEDLYWMSGYQHHLNPEALNLTPEDAVEALIGSGHHGAHHGAHHPAAAAAYEAFRGPGFAGGGGADDMGAGHHHGAHHAAHHHHAAHHHHHHHHHHGGAGHGGGAGHHVRLEERFSDDQLVSMSVRELNRQLRGFSKEEVIRLKQKRRTLKNRGYAQSCRFKRVQQRHILESEKCQLQSQAEQAKLEVGRLAKERDLYKEKYEKLAGRGGPGSAGGAGFPREPSPPQAGPGGAKGTADFFLESGGGGSPGRRRRRRRRRRR

SEQ ID NO: 126 - protein, 745 aa, Artificial Sequence
  Synthetic
MASKGERLFRGKVPILVELKGDVNGHKFSVRGKGKGDATRGKLTLKFICTTGKLPVPWPTLVTTLTYGVQCFSRYPKHMKRHDFFKSAMPKGYVQERTISFKKDGKYKTRAEVKFEGRTLVNRIKLKGRDFKEKGNILGHKLRYNFNSHKVYITADKRKNGIKAKFKIRHNVKDGSVQLADHYQQNTPIGRGPVLLPRNHYLSTRSKLSKDPKEKRDHMVLLEFVTAAGIKHGRDERYKGGSGGSGGSGGSHMGRKKIQITRIMDERNRQVTFTKRKFGLMKKAYEASVACDCEAALIIFNSTNKLFQYASTDMDKVLLKYTEYNEPHESRTNSDIVETLRKKGLNGCDSPDPDADDSVGHSPESEDKYRKINEDIDLMISRQRLCAVPPPNFEMPVSIPVSSHNSLVYSNPVSSLGNPNLLPLAHPSLQRNSMSPGVTHRPPSAGNTGGLMGGDLTSGAGTSAGNGYGNPRNSPGLLVSPGNLNKNMQAKSPPPMNLGMNNRKPDLRVLIPPGSKNTMPSVSEDVDLLLNQRINNSQSAQSLATPVVSVATPTLPGQGMGGYPSAISTTYGTEYSLSSADLSSLSGFNTASALHLGSVTGWQQQHLHNMPPSALSQLGACTSTHLSQSSNLSLPSTQSLNIKSEPVSPPRDRTTTPSRYPQHTRHEAGRSPVDSLSSCSSSYDGSDREDHRNEFHSPIGLTRPSPDERESPSVKRMRLSEGWATESGGGGSPGRRRRRRRRRRR

SEQ ID NO: 127 - protein, 540 aa, Artificial Sequence
  Synthetic
MASKGERLFRGKVPILVELKGDVNGHKFSVRGKGKGDATRGKLTLKFICTTGKLPVPWPTLVTTLTYGVQCFSRYPKHMKRHDFFKSAMPKGYVQERTISFKKDGKYKTRAEVKFEGRTLVNRIKLKGRDFKEKGNILGHKLRYNFNSHKVYITADKRKNGIKAKFKIRHNVKDGSVQLADHYQQNTPIGRGPVLLPRNHYLSTRSKLSKDPKEKRDHMVLLEFVTAAGIKHGRDERYKGGSGGSGGSGGSHMAQPLCPPLSESWMLSAAWGPTRRPPPSDKDCGRSLVSSPDSWGSTPADSPVASPARPGTLRDPRAPSVGRRGARSSRLGSGQRQSASEREKLRMRTLARALHELRRFLPPSVAPAGQSLTKAETARLAIRYAGHASAVLGLSEESLQRRCRQRGDAGSPRGCPLCPDDCPAQMQTRTQAEGQGQGRGLGLVSAVRAGASWGSPPACPGARAAPEPRDPPALFAEAACPEGQAMEPSPPSPLLPGDVLALLETWMPLSPLEWLPEEPKESGGGGSPGRRRRRRRRRRR

SEQ ID NO: 128 - protein, 612 aa, Artificial Sequence
  Synthetic
MASKGERLFRGKVPILVELKGDVNGHKFSVRGKGKGDATRGKLTLKFICTTGKLPVPWPTLVTTLTYGVQCFSRYPKHMKRHDFFKSAMPKGYVQERTISFKKDGKYKTRAEVKFEGRTLVNRIKLKGRDFKEKGNILGHKLRYNFNSHKVYITADKRKNGIKAKFKIRHNVKDGSVQLADHYQQNTPIGRGPVLLPRNHYLSTRSKLSKDPKEKRDHMVLLEFVTAAGIKHGRDERYKGGSGGSGGSGGSPKKKRKVEGGSGGSGGSGGSHMEAASPPARDVDLTAPDGSLCSFATTDDFYDDPCFDSPDLRFFEDLDPRLMHVGALLKPEEHSHFPAAVHPAPGAREDEHVRAPSGHHQAGRCLLWACKACKRKTTNADRRKAATMRERRRLSKVNEAFETLKRCTSSNPNQRLPKVEILRNAIRYIEGLQALLRDQDAAPPGAAAAFYAPGPLPPGRGGEHYSGDSDASSPRSNCSDGMMDYSGPPSGARRRNCYEGAYYNEAPSEPRPGKSAAVSSLDCLSSIVERISTESPAAPALLLADVPSESPPRRQEAAAPSEGESSGDPTQSPDAAPQCPAGANPNPIYQVLESGGGGSPGRRRRRRRRRRR

SEQ ID NO: 129 - protein, 1456 aa, Artificial Sequence
  Synthetic
MASKGERLFRGKVPILVELKGDVNGHKFSVRGKGKGDATRGKLTLKFICTTGKLPVPWPTLVTTLTYGVQCFSRYPKHMKRHDFFKSAMPKGYVQERTISFKKDGKYKTRAEVKFEGRTLVNRIKLKGRDFKEKGNILGHKLRYNFNSHKVYITADKRKNGIKAKFKIRHNVKDGSVQLADHYQQNTPIGRGPVLLPRNHYLSTRSKLSKDPKEKRDHMVLLEFVTAAGIKHGRDERYKGGSGGSGGSGGSHMEVDTEEKRHRTRSKGVRVPVEPAIQELFSCPTPGCDGSGHVSGKYARHRSVYGCPLAKKRKTQDKQPQEPAPKRKPFAVKADSSSVDECDDSDGTEDMDEKEEDEGEEYSEDNDEPGDEDEEDEEGDREEEEEIEEEDEDDDEDGEDVEDEEEEEEEEEEEEEEEENEDHQMNCHNTRIMQDTEKDDNNNDEYDNYDELVAKSLLNLGKIAEDAAYRARTESEMNSNTSNSLEDDSDKNENLGRKSEASADLDSDVVRETVDSLKLLAQGHGVVLSENMNDRNYADSMSQQDSRNMNYVMLGKPMNNGLMEKMVEESDEEVCLSSLECLRNQCFDLARKLSETNPQERNPQQNMNIRQHVRPEEDFPGRTPDRNYSDMLNLMRLEEQLSPRSRVFASCAKEDGCHERDDDTTSVNSDRSEEVFDMTKGNLTLLEKAIALETERAKAMREKMAMEAGRRDNMRSYEDQSPRQLPGEDRKPKSSDSHVKKPYYDPSRTEKKESKCPTPGCDGTGHVTGLYPHHRSLSGCPHKDRVPPEILAMHESVLKCPTPGCTGRGHVNSNRNSHRSLSGCPIAAAEKLAKAQEKHQSCDVSKSSQASDRVLRPMCFVKQLEIPQYGYRNNVPTTTPRSNLAKELEKYSKTSFEYNSYDNHTYGKRAIAPKVQTRDISPKGYDDAKRYCKDPSPSSSSTSSYAPSSSSNLSCGGGSSASSTCSKSSFDYTHDMEAAHMAATAILNLSTRCREMPQNLSTKPQDLCATRNPDMEVDENGTLDLSMNKQRPRDSCCPILTPLEPMSPQQQAVMNNRCFQLGEGDCWDLPVDYTKMKPRRIDEDESKDITPEDLDPFQEALEERRYPGEVTIPSPKPKYPQCKESKKDLITLSGCPLADKSIRSMLATSSQELKCPTPGCDGSGHITGNYASHRSLSGCPRAKKSGIRIAQSKEDKEDQEPIRCPVPGCDGQGHITGKYASHRSASGCPLAAKRQKDGYLNGSQFSWKSVKTEGMSCPTPGCDGSGHVSGSFLTHRSLSGCPRATSAMKKAKLSGEQMLTIKQRASNGIENDEEIKQLDEEIKELNESNSQMEADMIKLRTQITTMESNLKTIEEENKVIEQQNESLLHELANLSQSLIHSLANIQLPHMDPINEQNFDAYVTTLTEMYTNQDRYQSPENKALLENIKQAVRGIQVESGGGGSPGRRRRRRRRRRR

SEQ ID NO: 130 - protein, 577 aa, Artificial Sequence
  Synthetic
MASKGERLFRGKVPILVELKGDVNGHKFSVRGKGKGDATRGKLTLKFICTTGKLPVPWPTLVTTLTYGVQCFSRYPKHMKRHDFFKSAMPKGYVQERTISFKKDGKYKTRAEVKFEGRTLVNRIKLKGRDFKEKGNILGHKLRYNFNSHKVYITADKRKNGIKAKFKIRHNVKDGSVQLADHYQQNTPIGRGPVLLPRNHYLSTRSKLSKDPKEKRDHMVLLEFVTAAGIKHGRDERYKGGSGGSGGSGGSHMSVDPACPQSLPCFEASDCKESSPMPVICGPEENYPSLQMSSAEMPHTETVSPLPSSMDLLIQDSPDSSTSPKGKQPTSAEKSVAKKEDKVPVKKQKTRTVFSSTQLCVLNDRFQRQKYLSLQQAQEASNILNLSYKQVKTWFQNQRMKSKRWQKNNWPKNSNGVTQKASAPTYPSLYSSYHQGCLVNPTGNLPMWSNQTWNNSTWSNQTQNIQSWSNHSWNTQTWCTQSWNNQAWNSPFYNCGEESLQSCMQFQPNSPASDLEAALEAAGEGLNVIQQTTRYFSTPQTMDLFLNYSMNMQPEDVESGGGGSPGRRRRRRRRRRR

SEQ ID NO: 131 - protein, 732 aa, Artificial Sequence
  Synthetic
MASKGERLFRGKVPILVELKGDVNGHKFSVRGKGKGDATRGKLTLKFICTTGKLPVPWPTLVTTLTYGVQCFSRYPKHMKRHDFFKSAMPKGYVQERTISFKKDGKYKTRAEVKFEGRTLVNRIKLKGRDFKEKGNILGHKLRYNFNSHKVYITADKRKNGIKAKFKIRHNVKDGSVQLADHYQQNTPIGRGPVLLPRNHYLSTRSKLSKDPKEKRDHMVLLEFVTAAGIKHGRDERYKGGSGGSGGSGGSHMAESENRKELSESSQEEAGNQIMVEGLGEHLERGEDAAAGLGDDGKCGEEAAAGLGEEGENGEDTAAGSGEDGKKGGDTDEDSEADRPKGLIGYVLDTDFVESLPVKVKYRVLALKKLQTRAANLESKFLREFHDIERKFAEMYQPLLEKRRQIINAIYEPTEEECEYKSDSEDCDDEEMCHEEMYGNEEGMVHEYVDEDDGYEDYYYDYAVEEEEEEEEEDDIEATGEENKEEEDPKGIPDFWLTVLKNVDTLTPLIKKYDEPILKALTDAKVKLSDPGEPLSFTLEFHFKPNEYFKNELLTKTYVLKSKLAYYDPHPYRGTAIEYSTGCEIDWNEGKNVTLKTIKKKQKHRIWGTIRTVTEDFPKDSFFNFFSPHGITSNGRDGNDDFLLGHNLRTYIIPRSVLFFSGDALESQQEGVVREVNDAIYDKIIYDNWMAAIEEVKACCKNLEALVEDIDRESGGGGSPGRRRRRRRRRRR

SEQ ID NO: 132 - protein, 628 aa, Artificial Sequence
  Synthetic
MASKGERLFRGKVPILVELKGDVNGHKFSVRGKGKGDATRGKLTLKFICTTGKLPVPWPTLVTTLTYGVQCFSRYPKHMKRHDFFKSAMPKGYVQERTISFKKDGKYKTRAEVKFEGRTLVNRIKLKGRDFKEKGNILGHKLRYNFNSHKVYITADKRKNGIKAKFKIRHNVKDGSVQLADHYQQNTPIGRGPVLLPRNHYLSTRSKLSKDPKEKRDHMVLLEFVTAAGIKHGRDERYKGGSGGSGGSGGSHMTKSYSESGLMGEPQPQGPPSWTDECLSSQDEEHEADKKEDDLEAMNAEEDSLRNGGEEEDEDEDLEEEEEEEEEDDDQKPKRRGPKKKKMTKARLERFKLRRMKANARERNRMHGLNAALDNLRKVVPCYSKTQKASKAETLRLAKNYIWALSEILRSGKSPDLVSFVQTLCKGLSQPTTNLVAGCLQLNPRTFLPEQNQDMPPHLPTASASFPVHPYSYQSPGLPSPPYGTMDSSHVFHVKPPPHAYSAALEPFFESPLTDCTSPSFDGPLSPPLSINGNFSFKHEPSAEFEKNYAFTMHYPAATLAGAQSHGSIFSGTAAPRCEIPIDNIMSFDSHSHHERVMSAQLNAIFHDESGGGGSPGRRRRRRRRRRR

SEQ ID NO: 133 - protein, 654 aa, Artificial Sequence
  Synthetic
MASKGERLFRGKVPILVELKGDVNGHKFSVRGKGKGDATRGKLTLKFICTTGKLPVPWPTLVTTLTYGVQCFSRYPKHMKRHDFFKSAMPKGYVQERTISFKKDGKYKTRAEVKFEGRTLVNRIKLKGRDFKEKGNILGHKLRYNFNSHKVYITADKRKNGIKAKFKIRHNVKDGSVQLADHYQQNTPIGRGPVLLPRNHYLSTRSKLSKDPKEKRDHMVLLEFVTAAGIKHGRDERYKGGSGGSGGSGGSHMLTRLFSEPGLLSDVPKFASWGDGEDDEPRSDKGDAPPPPPPAPGPGAPGPARAAKPVPLRGEEGTEATLAEVKEEGELGGEEEEEEEEEEGLDEAEGERPKKRGPKKRKMTKARLERSKLRRQKANARERNRMHDLNAALDNLRKVVPCYSKTQKASKAETLRLAKNYIWALSEILRSGKRPDLVSYVQTLCKGLSQPTTNLVAGCLQLNSRNFLTEQGADGAGRFHGSGGPFAMHPYPYPCSRLAGAQCQAAGGLGGGAAHALRTHGYCAAYETLYAAAGGGGASPDYNSSEYEGPLSPPLCLNGNFSLKQDSSPDHEKSYHYSMHYSALPGSRPTGHGLVFGSSAVRGGVHSENLLSYDMHLHHDRGPMYEELNAFFHNESGGGGSPGRRRRRRRRRRR

SEQ ID NO: 134 - protein, 544 aa, Artificial Sequence
  Synthetic
MASKGERLFRGKVPILVELKGDVNGHKFSVRGKGKGDATRGKLTLKFICTTGKLPVPWPTLVTTLTYGVQCFSRYPKHMKRHDFFKSAMPKGYVQERTISFKKDGKYKTRAEVKFEGRTLVNRIKLKGRDFKEKGNILGHKLRYNFNSHKVYITADKRKNGIKAKFKIRHNVKDGSVQLADHYQQNTPIGRGPVLLPRNHYLSTRSKLSKDPKEKRDHMVLLEFVTAAGIKHGRDERYKGGSGGSGGSGGSHMFVKSETAEAKEEEDVLVLLGSASPALAALTPLSSSADEEEEEEPGASGGARRQRGAEAGQGARGGVAAGAEGCRPARLLGLVHDCKRRPSRARAVSRGAKTAETVQRIKKTRRLKANNRERNRMHNLNAALDALREVLPTFPEDAKLTKIETLRFAHNYIWALTETLRLADHCGGGGGGLPGALFSEAVLLSPGGASAALSSSGDSPSPASTWSCTNSPAPSSSVSSNSTSPYSCTLSPASPAGSDMDYWQPPPPDKHRYAPHLPIARDCIESGGGGSPGRRRRRRRRRRR

SEQ ID NO: 135 - protein, 486 aa, Artificial Sequence
  Synthetic
MASKGERLFRGKVPILVELKGDVNGHKFSVRGKGKGDATRGKLTLKFICTTGKLPVPWPTLVTTLTYGVQCFSRYPKHMKRHDFFKSAMPKGYVQERTISFKKDGKYKTRAEVKFEGRTLVNRIKLKGRDFKEKGNILGHKLRYNFNSHKVYITADKRKNGIKAKFKIRHNVKDGSVQLADHYQQNTPIGRGPVLLPRNHYLSTRSKLSKDPKEKRDHMVLLEFVTAAGIKHGRDERYKGGSGGSGGSGGSHMTPQPSGAPTVQVTRETERSFPRASEDEVTCPTSAPPSPTRTRGNCAEAEEGGCRGAPRKLRARRGGRSRPKSELALSKQRRSRRKKANDRERNRMHNLNSALDALRGVLPTFPDDAKLTKIETLRFAHNYIWAATQTARIADHSLYALEPPAPHCGELGSPGGSPGDWGSLYSPVSQAGSLSPAASLEERPGLLGATFSACLSPGSLAFSDFLESGGGGSPGRRRRRRRRRRR

SEQ ID NO: 136 - protein, 407 aa, Artificial Sequence
  Synthetic
MASKGERLFRGKVPILVELKGDVNGHKFSVRGKGKGDATRGKLTLKFICTTGKLPVPWPTLVTTLTYGVQCFSRYPKHMKRHDFFKSAMPKGYVQERTISFKKDGKYKTRAEVKFEGRTLVNRIKLKGRDFKEKGNILGHKLRYNFNSHKVYITADKRKNGIKAKFKIRHNVKDGSVQLADHYQQNTPIGRGPVLLPRNHYLSTRSKLSKDPKEKRDHMVLLEFVTAAGIKHGRDERYKGGSGGSGGSGGSHMMLSPDQAADSDHPSSAHSDPESLGGTDTKVLGSVSDLEPVEEAEGDGKGGSRAALYPHPQQLSREEKRRRRRATAKYRSAHATRERIRVEAFNLAFAELRKLLPTLPPDKKASKAEILRLAICYISYLNHVLDVESGGGGSPGRRRRRRRRRRR

SEQ ID NO: 137 - protein, 545 aa, Artificial Sequence
  Synthetic
MASKGERLFRGKVPILVELKGDVNGHKFSVRGKGKGDATRGKLTLKFICTTGKLPVPWPTLVTTLTYGVQCFSRYPKHMKRHDFFKSAMPKGYVQERTISFKKDGKYKTRAEVKFEGRTLVNRIKLKGRDFKEKGNILGHKLRYNFNSHKVYITADKRKNGIKAKFKIRHNVKDGSVQLADHYQQNTPIGRGPVLLPRNHYLSTRSKLSKDPKEKRDHMVLLEFVTAAGIKHGRDERYKGGSGGSGGSGGSHMSLTNTKTGFSVKDILDLPDTNDEEGSVAEGPEEENEGPEPAKRAGPLGQGAADAAQSLPLKNPFYDSSDNPYTRWLASTEGLQYSLHGLAAGAPPQDSSSKSPEPSADESPDNDKETPGGGGDAGKKRKRRVLFSKAQTYELERRFRQQRYLSAPEREHLASLIRLTPTQVKIWFQNHRYKMKRARAEKGMEVTPLPSPRRVAVPVLVRDGKPCHALKAQDLAAATFQAGIPFSAYSAQSLQHMQYNAQYSSASTPQYPTAHPLVQAQQWTWESGGGGSPGRRRRRRRRRRR

SEQ ID NO: 138 - protein, 596 aa, Artificial Sequence
  Synthetic
MASKGERLFRGKVPILVELKGDVNGHKFSVRGKGKGDATRGKLTLKFICTTGKLPVPWPTLVTTLTYGVQCFSRYPKHMKRHDFFKSAMPKGYVQERTISFKKDGKYKTRAEVKFEGRTLVNRIKLKGRDFKEKGNILGHKLRYNFNSHKVYITADKRKNGIKAKFKIRHNVKDGSVQLADHYQQNTPIGRGPVLLPRNHYLSTRSKLSKDPKEKRDHMVLLEFVTAAGIKHGRDERYKGGSGGSGGSGGSHMFPSPALTPTPFSVKDILNLEQQQRSLAAAGELSARLEATLAPSSCMLAAFKPEAYAGPEAAAPGLPELRAELGRAPSPAKCASAFPAAPAFYPRAYSDPDPAKDPRAEKKELCALQKAVELEKTEADNAERPRARRRRKPRVLFSQAQVYELERRFKQQRYLSAPERDQAASAAKLTSTQVKIWFQNRRYKCKRQRQDQTLELVGLPPPPPPPARRIAVPVLVRDGKPCLGDSAPYAPAYGVGLNPYGYNAYPAYPGYGGAACSPGYSCTAAYPAGPSPAQPATAAANNNFVNFGVGDLNAVQSPGIPQSNSGVSTLHGIRAWESGGGGSPGRRRRRRRRRRR

SEQ ID NO: 139 - protein, 639 aa, Artificial Sequence
  Synthetic
MASKGERLFRGKVPILVELKGDVNGHKFSVRGKGKGDATRGKLTLKFICTTGKLPVPWPTLVTTLTYGVQCFSRYPKHMKRHDFFKSAMPKGYVQERTISFKKDGKYKTRAEVKFEGRTLVNRIKLKGRDFKEKGNILGHKLRYNFNSHKVYITADKRKNGIKAKFKIRHNVKDGSVQLADHYQQNTPIGRGPVLLPRNHYLSTRSKLSKDPKEKRDHMVLLEFVTAAGIKHGRDERYKGGSGGSGGSGGSHMLAVGAMEGTRQSAFALSSPPAAALHSMAEMKTPLYPAAYPPLPAGPPSSSSSSSSSSSPSPPLGTHNPGGLKPPATGGLSSLGSPPQQLSAATPHGINDILSRPSMPVASGAALPSASPSGSSSSSSSSASASSASAAAAAAAAAAAAASSPAGLLAGLPRFSSLSPPPPPPGLYFSPSAAAVAAVGRYPKPLAELPGRTPIFWPGVMQSPPWRDARLACTPHQGSILLDKDGKRKHTRPTFSGQQIFALEKTFEQTKYLAGPERARLAYSLGMTESQVKVWFQNRRTKWRKKHAAEMATAKKKQDSETERLKGASENEEEDDDYNKPLDPNSDDEKITQLLKKHKSSSGGGGGLLLHASEPESSSESGGGGSPGRRRRRRRRRRR

SEQ ID NO: 140 - protein, 1074 aa, Artificial Sequence
  Synthetic
MASKGERLFRGKVPILVELKGDVNGHKFSVRGKGKGDATRGKLTLKFICTTGKLPVPWPTLVTTLTYGVQCFSRYPKHMKRHDFFKSAMPKGYVQERTISFKKDGKYKTRAEVKFEGRTLVNRIKLKGRDFKEKGNILGHKLRYNFNSHKVYITADKRKNGIKAKFKIRHNVKDGSVQLADHYQQNTPIGRGPVLLPRNHYLSTRSKLSKDPKEKRDHMVLLEFVTAAGIKHGRDERYKGGSGGSGGSGGSHMYRSTKGASKARRDQINAEIRNLKELLPLAEADKARASYLHIMSLACIYTRKGVFFAGGTPLAGPTGLLSAQELEDIVAALPGFLLVFTAEGKLLYLSESVSEHLGHSMVDLVAQGDSIYDIIDPADHLTVRQQLTLPSALDTDRLFRCRFNTSKSLRRQSAGNKLVLIRGRFHAHPPGAYWAGNPVFTAFCAPLEPRPRPGPGPGPGPASLFLAMFQSRHAKDLALLDISESVLIYLGFERSELLCKSWYGLLHPEDLAHASAQHYRLLAESGDIQAEMVVRLQAKTGGWAWIYCLLYSEGPEGPITANNYPISDMEAWSLRQQLNSEDTQAAYVLGTPTMLPSFPENILSQEECSSTNPLFTAALGAPRSTSFPSAPELSVVSASEELPRPSKELDFSYLTFPSGPEPSLQAELSKDLVCTPPYTPHQPGGCAFLFSLHEPFQTHLPTPSSTLQEQLTPSTATFSDQLTPSSATFPDPLTSPLQGQLTETSVRSYEDQLTPCTSTFPDQLLPSTATFPEPLGSPAHEQLTPPSTAFQAHLDSPSQTFPEQLSPNPTKTYFAQEGCSFLYEKLPPSPSSPGNGDCTLLALAQLRGPLSVDVPLVPEGLLTPEASPVKQSFFHYSEKEQNEIDRLIQQISQLAQGMDRPFSAEAGTGGLEPLGGLEPLDSNLSLSGAGPPVLSLDLKPWKCQELDFLADPDNMFLEETPVEDIFMDLSTPDPSEEWGSGDPEAEGPGGAPSPCNNLSPEDHSFLEDLATYETAFETGVSAFPYDGFTDELHQLQSQVQDSFHEDGSGGEPTFESGGGGSPGRRRRRRRRRRR

SEQ ID NO: 141 - protein, 513 aa, Artificial Sequence
  Synthetic
MASKGERLFRGKVPILVELKGDVNGHKFSVRGKGKGDATRGKLTLKFICTTGKLPVPWPTLVTTLTYGVQCFSRYPKHMKRHDFFKSAMPKGYVQERTISFKKDGKYKTRAEVKFEGRTLVNRIKLKGRDFKEKGNILGHKLRYNFNSHKVYITADKRKNGIKAKFKIRHNVKDGSVQLADHYQQNTPIGRGPVLLPRNHYLSTRSKLSKDPKEKRDHMVLLEFVTAAGIKHGRDERYKGGSGGSGGSGGSHMFYSGLLTEGGRKETDMREAASLRQQRRMKQAVQFIHKDSADLLPLDGLKKLGSSKDMQPHNILQRRLMETNLSKLRSGPRVPWASKTNKLNQAKSEGLKKSEEDDMILVSCQCAGKDVKALVDTGCLYNLISLACVDRLGLKEHVKSHKHEGEKLSLPRHLKVVGQIEHAVITAGSLRLDCPAAVVDDNEKNASAGLQTLRSLKCIINLDKHRLIMGKTDKEEIPFVETVSLNEDNTSEAESGGGGSPGRRRRRRRRRRR

SEQ ID NO: 142 - protein, 632 aa, Artificial Sequence
  Synthetic
MASKGERLFRGKVPILVELKGDVNGHKFSVRGKGKGDATRGKLTLKFICTTGKLPVPWPTLVTTLTYGVQCFSRYPKHMKRHDFFKSAMPKGYVQERTISFKKDGKYKTRAEVKFEGRTLVNRIKLKGRDFKEKGNILGHKLRYNFNSHKVYITADKRKNGIKAKFKIRHNVKDGSVQLADHYQQNTPIGRGPVLLPRNHYLSTRSKLSKDPKEKRDHMVLLEFVTAAGIKHGRDERYKGGSGGSGGSGGSHMAGHLASDFAFSPPPGGGGDGPGGPEPGWVDPRTWLSFQGPPGGPGIGPGVGPGSEVWGIPPCPPPYEFCGGMAYCGPQVGVGLVPQGGLETSQPEGEAGVGVESNSDGASPEPCTVTPGAVKLEKEKLEQNPEESQDIKALQKELEQFAKLLKQKRITLGYTQADVGLTLGVLFGKVFSQTTICRFEALQLSFKNMCKARPAAQKWVEEADNNENLQEICKAETLVQARKRKRTSIENRVRGNLENLFLQCPKPTLQQISHIAQQLGLEKDVVRVWFCNRRQKGKRSSSDYAQREDFEAAGSPFSGGPVSFPLAPGPHFGTPGYGSPHFTALYSSVPFPEGEAFPPVSVTTLGSPMHSNESGGGGSPGRRRRRRRRRRR

SEQ ID NO: 143 - protein, 595 aa, Artificial Sequence
  Synthetic
MASKGERLFRGKVPILVELKGDVNGHKFSVRGKGKGDATRGKLTLKFICTTGKLPVPWPTLVTTLTYGVQCFSRYPKHMKRHDFFKSAMPKGYVQERTISFKKDGKYKTRAEVKFEGRTLVNRIKLKGRDFKEKGNILGHKLRYNFNSHKVYITADKRKNGIKAKFKIRHNVKDGSVQLADHYQQNTPIGRGPVLLPRNHYLSTRSKLSKDPKEKRDHMVLLEFVTAAGIKHGRDERYKGGSGGSGGSGGSHMDSDASLVSSRPSSPEPDDLFLPARSKGSSGSAFTGGTVSSSTPSDCPPELSAELRGAMGSAGAHPGDKLGGSGFKSSSSSTSSSTSSAAASSTKKDKKQMTEPEAQQARLKINSRERKRMHDLNIAMDGLREVMPYAHGPSVRKLSKIATLLLARNYILMLTNSLEEMKRLVSEIYGGHHAGFHPSACGGLAHSAPLPAATAHPAAAAHAAHHPAVHHPILPPAAAAAAAAAAAAAVSSASLPGSGLPSVGSIRPPHGLLKSPSAAAAAPLGGGGGGSGASGGFQHWGGMPCPCSMCQVPPPHHHVSAMGAGSLPRLTSDAKESGGGGSPGRRRRRRRRRRR

SEQ ID NO: 144 - protein, 694 aa, Artificial Sequence
  Synthetic
MASKGERLFRGKVPILVELKGDVNGHKFSVRGKGKGDATRGKLTLKFICTTGKLPVPWPTLVTTLTYGVQCFSRYPKHMKRHDFFKSAMPKGYVQERTISFKKDGKYKTRAEVKFEGRTLVNRIKLKGRDFKEKGNILGHKLRYNFNSHKVYITADKRKNGIKAKFKIRHNVKDGSVQLADHYQQNTPIGRGPVLLPRNHYLSTRSKLSKDPKEKRDHMVLLEFVTAAGIKHGRDERYKGGSGGSGGSGGSHMQNSHSGVNQLGGVFVNGRPLPDSTRQKIVELAHSGARPCDISRILQVSNGCVSKILGRYYETGSIRPRAIGGSKPRVATPEVVSKIAQYKRECPSIFAWEIRDRLLSEGVCTNDNIPSVSSINRVLRNLASEKQQMGADGMYDKLRMLNGQTGSWGTRPGWYPGTSVPGQPTQDGCQQQEGGGENTNSISSNGEDSDEAQMRLQLKRKLQRNRTSFTQEQIEALEKEFERTHYPDVFARERAAAKADLPEARIQVWFSNRRAKWRREEKLRNQRRQASNTPSHIPISSSFSTSVYQPIPQPTTPVSSFTSGSMLGRTDTALTNTYSALPPMPSFTMANNLPMQPPVPSQTSSYSCMLPTSPSVNGRSYDTYTPPHMQTHMNSQPMGTSGTTSTGLISPGVSVPVQVPGSEPDMSQYWPRLQESGGGGSPGRRRRRRRRRRR

SEQ ID NO: 145 - protein, 792 aa, Artificial Sequence
  Synthetic
MASKGERLFRGKVPILVELKGDVNGHKFSVRGKGKGDATRGKLTLKFICTTGKLPVPWPTLVTTLTYGVQCFSRYPKHMKRHDFFKSAMPKGYVQERTISFKKDGKYKTRAEVKFEGRTLVNRIKLKGRDFKEKGNILGHKLRYNFNSHKVYITADKRKNGIKAKFKIRHNVKDGSVQLADHYQQNTPIGRGPVLLPRNHYLSTRSKLSKDPKEKRDHMVLLEFVTAAGIKHGRDERYKGGSGGSGGSGGSHMAALPGTVPRMMRPAPGQNYPRTGFPLEVSTPLGQGRVNQLGGVFINGRPLPNHIRHKIVEMAHHGIRPCVISRQLRVSHGCVSKILCRYQETGSIRPGAIGGSKPRQVATPDVEKKIEEYKRENPGMFSWEIRDRLLKDGHCDRSTVPSGAVSSASRVLRIKFGKKEEEDEADKKEDDGEKKAKHSIDGILGDKGNRLDEGSDVESEPDLPLKRKQRRSRTTFTAEQLEELEKAFERTHYPDIYTREELAQRTKLTEARVQVWFSNRRARWRKQAGANQLAAFNHLLPGGFPPTGMPTLPPYQLPDSTYPTTTISQDGGSTVHRPQPLPPSTMHQGGLAAAAAAADTSSAYGARHSFSSYSDSFMNPAAPSNHMNPVSNGLSPQVMSILGNPSAVPPQPQADFSISPLHGGLDSATSISASCSQRADSIKPGDSLPTSQAYCPPTYSTTGYSVDPVAGYQYGQYGQSECLVPWASPVPIPSPTPRASCLFMESYKVVSGWGMSISQMEKLKSSQMEQFTESGGGGSPGRRRRRRRRRRR

SEQ ID NO: 146 - protein, 521 aa, Artificial Sequence
  Synthetic
MASKGERLFRGKVPILVELKGDVNGHKFSVRGKGKGDATRGKLTLKFICTTGKLPVPWPTLVTTLTYGVQCFSRYPKHMKRHDFFKSAMPKGYVQERTISFKKDGKYKTRAEVKFEGRTLVNRIKLKGRDFKEKGNILGHKLRYNFNSHKVYITADKRKNGIKAKFKIRHNVKDGSVQLADHYQQNTPIGRGPVLLPRNHYLSTRSKLSKDPKEKRDHMVLLEFVTAAGIKHGRDERYKGGSGGSGGSGGSHMNGEEQYYAATQLYKDPCAFQRGPAPEFSASPPACLYMGRQPPPPPPHPFPGALGALEQGSPPDISPYEVPPLADDPAVAHAHHHAPAQLALPHPPAGPFPEGAEPGVLEEPNRVQLPFPWMKSTKAHAWKGQWAGGAYAAEPEENKRTRTAYTRAQLLELEKEFLFNKYISRPRRVELAVMLNLTERHIKIWFQNRRMKWKKEEDKKRGGGTAVGGGGVAEPEQDCAVTSGEELLALPPPPPPGGAVPESGGGGSPGRRRRRRRRRRR

SEQ ID NO: 147 - protein, 961 aa, Artificial Sequence
  Synthetic
MASKGERLFRGKVPILVELKGDVNGHKFSVRGKGKGDATRGKLTLKFICTTGKLPVPWPTLVTTLTYGVQCFSRYPKHMKRHDFFKSAMPKGYVQERTISFKKDGKYKTRAEVKFEGRTLVNRIKLKGRDFKEKGNILGHKLRYNFNSHKVYITADKRKNGIKAKFKIRHNVKDGSVQLADHYQQNTPIGRGPVLLPRNHYLSTRSKLSKDPKEKRDHMVLLEFVTAAGIKHGRDERYKGGSGGSGGSGGSHMEDTGIQRGIWDGDAKAVQQCLTDIFTSVYTTCDIPENAIFGPCVLSHTSLYDSIAFIALKSTDKRTVPYIFRVDTSAANGSSEGLMWLRLVQSARDKEEQNLEAYIKNGQLFYRSARRAAKDEELLVWYGKELTELLLLCPSRSHNKMNGSSPYTCLECSQRFQFEFPYVAHLRFRCPKRLHSADISPQDEQGGGVGTKDHGGGGGGGKDQQQQQQEAPLGPGPKFCKAGPLHHYPSPSPESSNPSAAAGGSSAKPSTDFHNLARELENSRGGSSCSPAQSLSSGSGSGGGGGHQEAELSPDGIATGGGKGKRKFPEEAAEGGGGAGLVGGRGRFVERPLPASKEDLVCTPQQYRASGSYFGLEENGRLFAPPSPETGEAKRSAFVEVKKAARAASLQEEGTADGAGVASEDQDAGGGGGSSTPAAASPVGAEKLLAPRPGGPLPSRLEGGSPARGSAFTSVPQLGSAGSTSGGGGTGAGAAGGAGGGQGAASDERKSAFSQPARSFSQLSPLVLGQKLGALEPCHPADGVGPTRLYPAAADPLAVKLQGAADLNGGCGSLPSGGGGLPKQSPFLYATAFWPKSSAAAAAAAAAAAAGPLQLQLPSALTLLPPSFTSLCLPAQNWCAKCNASFRMTSDLVYHMRSHHKKEYAMEPLVKRRREEKLKCPICNESFRERHHLSRHMTSHNESGGGGSPGRRRRRRRRRRR

SEQ ID NO: 148 - protein, 1005 aa, Artificial Sequence
  Synthetic
MASKGERLFRGKVPILVELKGDVNGHKFSVRGKGKGDATRGKLTLKFICTTGKLPVPWPTLVTTLTYGVQCFSRYPKHMKRHDFFKSAMPKGYVQERTISFKKDGKYKTRAEVKFEGRTLVNRIKLKGRDFKEKGNILGHKLRYNFNSHKVYITADKRKNGIKAKFKIRHNVKDGSVQLADHYQQNTPIGRGPVLLPRNHYLSTRSKLSKDPKEKRDHMVLLEFVTAAGIKHGRDERYKGGSGGSGGSGGSHMERRSESPCLRDSPDRRSGSPDVKGPPPVKVARLEQNGSPMGARGRPNGAVAKAVGGLMIPVFCVVEQLDGSLEYDNREEHAEFVLVRKDVLFSQLVETALLALGYSHSSAAQAQGIIKLGRWNPLPLSYVTDAPDATVADMLQDVYHVVTLKIQLQSCSKLEDLPAEQWNHATVRNALKELLKEMNQSTLAKECPLSQSMISSIVNSTYYANVSATKCQEFGRWYKKYKKIKVERVERENLSDYCVLGQRPMHLPNMNQLASLGKTNEQSPHSQIHHSTPIRNQVPALQPIMSPGLLSPQLSPQLVRQQIAMAHLINQQIAVSRLLAHQHPQAINQQFLNHPPIPRAVKPEPTNSSVEVSPDIYQQVRDELKRASVSQAVFARVAFNRTQGLLSEILRKEEDPRTASQSLLVNLRAMQNFLNLPEVERDRIYQDERERSMNPNVSMVSSASSSPSSSRTPQAKTSTPTTDLPIKVDGANINITAAIYDEIQQEMKRAKVSQALFAKVAANKSQGWLCELLRWKENPSPENRTLWENLCTIRRFLNLPQHERDVIYEEESRHHHSERMQHVVQLPPEPVQVLHRQQSQPAKESSPPREEAPPPPPPTEDSCAKKPRSRTKASAEALGILQSFIHDVGLYPDQEAIHTLSAQLDLPKHTIIKFFQNQRYHVKHHGKLKEHLGSAVDVAEYKDEELLTESEENDSEEGSEEMYKVEAEEENADKSKAAPAEIDQRESGGGGSPGRRRRRRRRRRR

SEQ ID NO: 149 - protein, 627 aa, Artificial Sequence
  Synthetic
MASKGERLFRGKVPILVELKGDVNGHKFSVRGKGKGDATRGKLTLKFICTTGKLPVPWPTLVTTLTYGVQCFSRYPKHMKRHDFFKSAMPKGYVQERTISFKKDGKYKTRAEVKFEGRTLVNRIKLKGRDFKEKGNILGHKLRYNFNSHKVYITADKRKNGIKAKFKIRHNVKDGSVQLADHYQQNTPIGRGPVLLPRNHYLSTRSKLSKDPKEKRDHMVLLEFVTAAGIKHGRDERYKGGSGGSGGSGGSHMEELTAFVSKSFDQKVKEKKEAITYREVLESGPLRGAKEPTGCTEAGRDDRSSPAVRAAGGGGGGGGGGGGGGGGGGVGGGGAGGGAGGGRSPVRELDMGAAERSREPGSPRLTEGRRKPTKAEVQATLLLPGEAFRFLVSPELKDRKEDAKGMEDEGQTKIKQRRSRTNFTLEQLNELERLFDETHYPDAFMREELSQRLGLSEARVQVWFQNRRAKCRKQENQLHKGVLIGAASQFEACRVAPYVNVGALRMPFQQDSHCNVTPLSFQVQAQLQLDSAVAHAHHHLHPHLAAHAPYMMFPAPPFGLPLATLAADSASAASVVAAAAAAKTTSKNSSAADARLKAKKHAAALGLESGGGGSPGRRRRRRRRRRR

SEQ ID NO: 150 - protein, 589 aa, Artificial Sequence
  Synthetic
MASKGERLFRGKVPILVELKGDVNGHKFSVRGKGKGDATRGKLTLKFICTTGKLPVPWPTLVTTLTYGVQCFSRYPKHMKRHDFFKSAMPKGYVQERTISFKKDGKYKTRAEVKFEGRTLVNRIKLKGRDFKEKGNILGHKLRYNFNSHKVYITADKRKNGIKAKFKIRHNVKDGSVQLADHYQQNTPIGRGPVLLPRNHYLSTRSKLSKDPKEKRDHMVLLEFVTAAGIKHGRDERYKGGSGGSGGSGGSHMYNMMETELKPPGPQQTSGGGGGNSTAAAAGGNQKNSPDRVKRPMNAFMVWSRGQRRKMAQENPKMHNSEASKRAGAEWKLLSETEKRPFIDEAKRLRALHMKEHPDYKYRPRRKTKTLMKKDKYTLPGGLLAPGGNSMASGVGVGAGLGAGVNQRMDSYAHMNGWSNGSYSMMQDQLGYPQHPGLNAHGAAQMQPMHRYDVSALQYNSMTSSQTYMNGSPTYSMSYSQQGTPGMALGSMGSVVKSEASSSPPVVTSSSHSRAPCQAGDLRDMISMYLPGAEVPEPAAPSRLHMSQHYQSGPVPGTAINGTLPLSHMESGGGGSPGRRRRRRRRRRR

SEQ ID NO: 151 - protein, 781 aa, Artificial Sequence
  Synthetic
MASKGERLFRGKVPILVELKGDVNGHKFSVRGKGKGDATRGKLTLKFICTTGKLPVPWPTLVTTLTYGVQCFSRYPKHMKRHDFFKSAMPKGYVQERTISFKKDGKYKTRAEVKFEGRTLVNRIKLKGRDFKEKGNILGHKLRYNFNSHKVYITADKRKNGIKAKFKIRHNVKDGSVQLADHYQQNTPIGRGPVLLPRNHYLSTRSKLSKDPKEKRDHMVLLEFVTAAGIKHGRDERYKGGSGGSGGSGGSHMNLLDPFMKMTDEQEKGLSGAPSPTMSEDSAGSPCPSGSGSDTENTRPQENTFPKGEPDLKKESEEDKFPVCIREAVSQVLKGYDWTLVPMPVRVNGSSKNKPHVKRPMNAFMVWAQAARRKLADQYPHLHNAELSKTLGKAWRLLNESEKRPFVEEAERLRVQHKKDHPDYKYQPRRRKSVKNGQAEAEEATEQTHISPNAIFKALQADSPHSSSGMSEVHSPGEHSGQSQGPPTPPTTPKTDVQPGKADLKREGRPLPEGGRQPPIDFRDVDIGELSSDVISNIETFDVNEFDQYLPPNGHPGVPATHGQVTYTGSYGISSTAATPASAGHVWMSKQQAPPPPPQQPPQAPPAPQAPPQPQAAPPQQPAAPPQQPQAHTLTTLSSEPGQSQRTHIKTEQLSPSHYSEQQQHSPQQIAYSPFNLPHYSPSYPPITRSQYDYTDHQNSSSYYSHAAGQGTGLYSTFTYMNPAQRPMYTPIADTSGVPSIPQTHSPQHWEQPVYTQLTRPESGGGGSPGRRRRRRRRRRR

SEQ ID NO: 152 - protein, 954 aa, Artificial Sequence
  Synthetic
MASKGERLFRGKVPILVELKGDVNGHKFSVRGKGKGDATRGKLTLKFICTTGKLPVPWPTLVTTLTYGVQCFSRYPKHMKRHDFFKSAMPKGYVQERTISFKKDGKYKTRAEVKFEGRTLVNRIKLKGRDFKEKGNILGHKLRYNFNSHKVYITADKRKNGIKAKFKIRHNVKDGSVQLADHYQQNTPIGRGPVLLPRNHYLSTRSKLSKDPKEKRDHMVLLEFVTAAGIKHGRDERYKGGSGGSGGSGGSHMQLEHCLSPSIMLSKKFLNVSSSYPHSGGSELVLHDHPIISTTDNLERSSPLKKITRGMTNQSDTDNFPDSKDSPGDVQRSKLSPVLDGVSELRHSFDGSAADRYLLSQSSQPQSAATAPSAMFPYPGQHGPAHPAFSIGSPSRYMAHHPVITNGAYNSLLSNSSPQGYPTAGYPYPQQYGHSYQGAPFYQFSSTQPGLVPGKAQVYLCNRPLWLKFHRHQTEMIITKQGRRMFPFLSFNISGLDPTAHYNIFVDVILADPNHWRFQGGKWVPCGKADTNVQGNRVYMHPDSPNTGAHWMRQEISAGKAKLTNNKGASNNNGQMVVLQSLHKYQPRLHVVEVNEDGTEDTSQPGRVQTFTFPETQFIAVTAYQNTDITQLKIDHNPFAKGFRDNYDTIYTGCDMDRLTPSPNDSPRSQIVPGARYAMAGSFLQDQFVSNYAKARFHPGAGAGPGPGTDRSVPHTNGLLSPQQAEDPGAPSPQRWFVTPANNRLDFAASAYDTATDFAGNAATLLSYAAAGVKALPLQAAGCTGRPLGYYADPSGWGARSPPQYCGTKSGSVLPCWPNSAAAAARMAGANPYLGEEAEGLAAERSPLPPGAAEDAKPKDLSDSSWIETPSSIKSIDSSDSGIYEQAKRRRISPADTPVSESSSPLKSEVLAQRDCEKNCAKDISGYYGFYSHSESGGGGSPGRRRRRRRRRRR

SEQ ID NO: 153 - protein, 785 aa, Artificial Sequence
  Synthetic
MASKGERLFRGKVPILVELKGDVNGHKFSVRGKGKGDATRGKLTLKFICTTGKLPVPWPTLVTTLTYGVQCFSRYPKHMKRHDFFKSAMPKGYVQERTISFKKDGKYKTRAEVKFEGRTLVNRIKLKGRDFKEKGNILGHKLRYNFNSHKVYITADKRKNGIKAKFKIRHNVKDGSVQLADHYQQNTPIGRGPVLLPRNHYLSTRSKLSKDPKEKRDHMVLLEFVTAAGIKHGRDERYKGGSGGSGGSGGSHMADADEALAGAHLWSLTQKTCLRFEPRARSGPPASPPGRPRSRLHPAGMEGIKVFLHERELWLKFHEVTEMIITKAGRRMFPSYKVKVTGINPKTKYILLMDIVPADDHRYKFADNKWCVTGKAEPAMAGRLYVHPDSPATGAHWMRQAVSAQKLKLTNNHLDPFGHIILNSMHKYQPRLHIVKADENNGFGSKNTAFCTHVFPETAFIAVTSYQNHKITQLKIENNPFAKGFRGSDDMELHRMSRMQSKEYPVVPRSTVRQKVASNHSPFSSESRALSTSSNLGSQYQCENGVSGPSQDLLPPPNPYPLPQEHSQIYHCTKRKEEECSTTDHPYKKPYMETSPSEEDSFYRSSYPQQQGLGASYRTESAQRQACMYASSAPPSEPVPSLEDISCNTWPSMPSYSSCTVTTVQPWTGYPTSTSPLTSPRGPWSLGWLAWQPWLPTAGRGNVPSTRPPVAHQPVVSSVGPQTGLQSPGTLQPPEFLYSHGVQGLYPLISTTLCTELAWCRVERQESGGGGSPGRRRRRRRRRRR

SEQ ID NO: 154 - protein, 879 aa, Artificial Sequence
  Synthetic
MASKGERLFRGKVPILVELKGDVNGHKFSVRGKGKGDATRGKLTLKFICTTGKLPVPWPTLVTTLTYGVQCFSRYPKHMKRHDFFKSAMPKGYVQERTISFKKDGKYKTRAEVKFEGRTLVNRIKLKGRDFKEKGNILGHKLRYNFNSHKVYITADKRKNGIKAKFKIRHNVKDGSVQLADHYQQNTPIGRGPVLLPRNHYLSTRSKLSKDPKEKRDHMVLLEFVTAAGIKHGRDERYKGGSGGSGGSGGSHMAEKRRGSPCSMLSLKAHAFSVEALIGAEKQQQLQKKRRKLGAEEAAGAVDDGGCSRGGGAGEKGSSEGDEGAALPPPAGATSGPARSGADLERGAAGGCEDGFQQGASPLASPGGSPKGSPARSLARPGTPLPSPQAPRVDLQGAELWKRFHEIGTEMIITKAGRRMFPAMRVKISGLDPHQQYYIAMDIVPVDNKRYRYVYHSSKWMVAGNADSPVPPRVYIHPDSPASGETWMRQAISADKLKLTNNELDDQGHIILHSMHKYQPRVHVIRKDCGDDLSPIKPVPSGEGVKAFSFPETVFTTVTAYQNQQITRLKIDRNPFAKGFRDSGRNRMGLEALVESYAFWRPSLRTLTFEDIPGIPKQGNASSSTLLQGTGNGVPATHPHLLSGSSCSSPAFHLGPNTSQLCSLAPADYSACARSGLTLNRYSTSLAETYNRLTNQAGETFAPPRTPSYVGVSSSTSVNMSMGGTDGDTFSCPQTSLSMQISGMSPQLQYIMPSPSSNAFATNQTHQGSYNTFRLHSPCALYGYNFSTSPKLAASPEKIVSSQGSFLGSSPSGTMTDRQMLPPVEGVHLLSSGGQQSFFDSRTLGSLTLSSSQVSAHMVESGGGGSPGRRRRRRRRRRR

SEQ ID NO: 155 - protein, 719 aa, Artificial Sequence
  Synthetic
MASKGERLFRGKVPILVELKGDVNGHKFSVRGKGKGDATRGKLTLKFICTTGKLPVPWPTLVTTLTYGVQCFSRYPKHMKRHDFFKSAMPKGYVQERTISFKKDGKYKTRAEVKFEGRTLVNRIKLKGRDFKEKGNILGHKLRYNFNSHKVYITADKRKNGIKAKFKIRHNVKDGSVQLADHYQQNTPIGRGPVLLPRNHYLSTRSKLSKDPKEKRDHMVLLEFVTAAGIKHGRDERYKGGSGGSGGSGGSHMLLDAGPQYPAIGVTTFGASRHHSAGDAAERDAGLGINPFADGMGAFKLNPSSHELASAGQTAFTSQAPGYAAAAALGHHHHPGHVGSYSSAAFNSTRDFLFRNRGFGDAAAAASAQHSLFAASAGGFGGPHGHTDAAGHLLFPGLHEQAAGHASPNVVNGQMRLGFSGDMYPRPEQYGQVTSPRSEHYAAPQLHGYGPMNVNMAAHHGAGAFFRYMRQPIKQELICKWIEPEQLANPKKSCNKTFSTMHELVTHVTVEHVGGPEQSNHICFWEECPREGKPFKAKYKLVNHIRVHTGEKPFPCPFPGCGKVFARSENLKIHKRTHTGEKPFKCEFEGCDRRFANSSDRKKHMHVHTSDKPYLCKMCDKSYTHPSSLRKHMKVHESSSQGSQPSPAASSGYESSTPPTIVSPSTDNPTTSSLSPSSSAVHHTAGHSALSSNFNEWYVESGGGGSPGRRRRRRRRRRR

SEQ ID NO: 156 - protein, 632 aa, Artificial Sequence
  Synthetic
MASKGERLFRGKVPILVELKGDVNGHKFSVRGKGKGDATRGKLTLKFICTTGKLPVPWPTLVTTLTYGVQCFSRYPKHMKRHDFFKSAMPKGYVQERTISFKKDGKYKTRAEVKFEGRTLVNRIKLKGRDFKEKGNILGHKLRYNFNSHKVYITADKRKNGIKAKFKIRHNVKDGSVQLADHYQQNTPIGRGPVLLPRNHYLSTRSKLSKDPKEKRDHMVLLEFVTAAGIKHGRDERYKGGSGGSGGSGGSHMAGHLASDFAFSPPPGGGGDGPGGPEPGWVDPRTWLSFQGPPGGPGIGPGVGPGSEVWGIPPCPPPYEFCGGMAYCGPQVGVGLVPQGGLETSQPEGEAGVGVESNSDGASPEPCTVTPGAVKLEKEKLEQNPEESQDIKALQKELEQFAKLLKQKRITLGYTQADVGLTLGVLFGKVFSQTTICRFEALQLSFKNMCKLRPLLQKWVEEADNNENLQEICKAETLVQARKRKRTSIENRVRGNLENLFLQCPKPTLQQISHIAQQLGLEKDVVRVWFCNRRQKGKRSSSDYAQREDFEAAGSPFSGGPVSFPLAPGPHFGTPGYGSPHFTALYSSVPFPEGEAFPPVSVTTLGSPMHSNESGGGGSPGRRRRRRRRRRR

SEQ ID NO: 157 - protein, 592 aa, Artificial Sequence
  Synthetic
MASKGERLFRGKVPILVELKGDVNGHKFSVRGKGKGDATRGKLTLKFICTTGKLPVPWPTLVTTLTYGVQCFSRYPKHMKRHDFFKSAMPKGYVQERTISFKKDGKYKTRAEVKFEGRTLVNRIKLKGRDFKEKGNILGHKLRYNFNSHKVYITADKRKNGIKAKFKIRHNVKDGSVQLADHYQQNTPIGRGPVLLPRNHYLSTRSKLSKDPKEKRDHMVLLEFVTAAGIKHGRDERYKGGSGGSGGSGGSHMELLSPPLRDVDLTAPDGSLCSFATTDDFYDDPCFDSPDLRFFEDLDPRLMHVGALLKPEEHSHFPAAVHPAPGAREDEHVRAPSGHHQAGRCLLWACKACKRKTTNADRRKAATMRERRRLSKVNEAFETLKRCTSSNPNQRLPKVEILRNAIRYIEGLQALLRDQDAAPPGAAAAFYAPGPLPPGRGGEHYSGDSDASSPRSNCSDGMMDYSGPPSGARRRNCYEGAYYNEAPSEPRPGKSAAVSSLDCLSSIVERISTESPAAPALLLADVPSESPPRRQEAAAPSEGESSGDPTQSPDAAPQCPAGANPNPIYQVLESGGGGSPGRRRRRRRRRRR

SEQ ID NO: 158 - protein, 612 aa, Artificial Sequence
  Synthetic
MASKGERLFRGKVPILVELKGDVNGHKFSVRGKGKGDATRGKLTLKFICTTGKLPVPWPTLVTTLTYGVQCFSRYPKHMKRHDFFKSAMPKGYVQERTISFKKDGKYKTRAEVKFEGRTLVNRIKLKGRDFKEKGNILGHKLRYNFNSHKVYITADKRKNGIKAKFKIRHNVKDGSVQLADHYQQNTPIGRGPVLLPRNHYLSTRSKLSKDPKEKRDHMVLLEFVTAAGIKHGRDERYKGGSGGSGGSGGSPKKKRKVEGGSGGSGGSGGSHMELLSPPLRDVDLTAPDGSLCSFATTDDFYDDPCFDSPDLRFFEDLDPRLMHVGALLKPEEHSHFPAAVHPAPGAREDEHVRAPSGHHQAGRCLLWACKACKRKTTNADRRKAATMRERRRLSKVNEAFETLKRCTSSNPNQRLPKVEILRNAIRYIEGLQALLRDQDAAPPGAAAAFYAPGPLPPGRGGEHYSGDSDASSPRSNCSDGMMDYSGPPSGARRRNCYEGAYYNEAPSEPRPGKSAAVSSLDCLSSIVERISTESPAAPALLLADVPSESPPRRQEAAAPSEGESSGDPTQSPDAAPQCPAGANPNPIYQVLESGGGGSPGRRRRRRRRRRR
